(19) United States
(12) Patent Application Publication
(10) Pub. No.: US 2017/0355991 A1
(43) Pub. Date: Dec. 14, 2017

(54) COMPOSITIONS AND METHODS TO CONTROL INSECT PESTS

(71) Applicants: PIONEER HI-BRED INTERNATIONAL, INC., JOHNSTON, IA (US); E. I. DU PONT DE NEMOURS AND COMPANY, WILMINGTON, DE (US)

(72) Inventors: XU HU, JOHNSTON, IA (US); JAMES PRESNAIL, ST LOUIS, MO (US); NINA RICHTMAN, JOHNSTON, IA (US); SCOTT DIEHN, WEST DES MOINES, IA (US); MICHELLE VAN ALLEN, URBANDALE, IA (US); LISA PROCYK, ANKENY, IA (US)

(73) Assignees: PIONEER HI-BRED INTERNATIONAL, INC., JOHNSTON, IA (US); E. I. DU PONT DE NEMOURS AND COMPANY, WILMINGTON, DE (US)

(21) Appl. No.: 15/691,243

(22) Filed: Aug. 30, 2017

Related U.S. Application Data
(62) Division of application No. 13/831,230, filed on Mar. 14, 2013.

(51) Int. Cl. C12N 15/113; C12N 15/82; A01N 37/46; A01N 63/02

(52) U.S. Cl. CPC C12N 15/113; A01N 63/02; C12N 15/8218; C12N 15/8286; A01N 37/46; C12N 2310/14; C12N 2310/531

(57) ABSTRACT

Methods and compositions are provided which employ a silencing element that, when ingested by a pest, such as a Coleopteran plant pest or a Diabrotica plant pest, decrease the expression of a target sequence in the pest. In specific embodiments, the decrease in expression of the target sequence controls the pest and thereby the methods and compositions are capable of limiting damage to a plant. The present invention provides various target polynucleotides set forth in any one of SEQ ID NOS: disclosed herein, (but not including the forward and reverse primers.) or active variants and fragments thereof, or complements thereof, wherein a decrease in expression of one or more of the sequences in the target pest controls the pest (i.e., has insecticidal activity). Further provided are silencing elements which when ingested by the pest decrease the level of the target polypeptide and thereby control the pest. In specific embodiments, the pest is D. virgifera virgifera, D. barberi, D. virgifera zeae, D. speciosa, D. speciosa, or D. undecimpunctata howardi. Plants, plant parts, bacteria and other host cells comprising the silencing elements or an active variant or fragment thereof of the invention are also provided.

### CROSS-REFERENCE TO RELATED APPLICATIONS

[0001] This application is a divisional of U.S. Utility application Ser. No. 13/831,230, filed Mar. 14, 2013, which is incorporated herein by reference in its entirety.

### FIELD OF THE INVENTION

[0002] The present invention relates generally to methods of molecular biology and gene silencing to control pests.

### REFERENCE TO A SEQUENCE LISTING SUBMITTED AS A TEXT FILE VIA EFS-WEB

[0003] The Sequence Listing submitted concurrently as a text file named “36446_0007U2_12_17_13_Corrected_Sequence_Listing,” created on Dec. 17, 2013, and having a size of 691,157 bytes is hereby incorporated by reference pursuant to 37 C.F.R. §1.52(e)(5).

### BACKGROUND OF THE INVENTION

[0004] Insect pests are a serious problem in agriculture. They destroy millions of acres of staple crops such as corn, soybeans, peas, and cotton. Yearly, these pests cause over $100 billion dollars in crop damage in the U.S. alone. In an ongoing seasonal battle, farmers must apply billions of gallons of synthetic pesticides to combat these pests. Other methods employed in the past delivered insecticidal activity by microorganisms or genes derived from microorganisms expressed in transgenic plants. For example, certain species of microorganisms of the genus Bacillus are known to possess pesticidal activity against a broad range of insect pests including Lepidoptera, Diptera, Coleoptera, Hemiptera, and others. In fact, microbial pesticides, particularly those obtained from Bacillus strains, have played an important role in agriculture as alternatives to chemical pest control. Agricultural scientists have developed crop plants with enhanced insect resistance by genetically engineering crop plants to produce insecticidal proteins from Bacillus. For example, corn and cotton plants genetically engineered to produce Cry toxins (see, e.g., Aronson (2002) Cell Mol. Life Sci. 59(3):417-425; Schnepf et al. (1998) Microbiol. Mol. Biol. Rev. 62(3):775-806) are now widely used in American agriculture and have provided the farmer with an alternative to traditional insect-control methods. However, these Bt insecticidal proteins only protect plants from a relatively narrow range of pests. Moreover, these modes of insecticidal activity provided varying levels of specificity and, in some cases, caused significant environmental consequences. Thus, there is an immediate need for alternative methods to control pests.

### BRIEF SUMMARY OF THE INVENTION

[0005] Methods and compositions are provided which employ a silencing element that, when ingested by a pest, such as Coleopteran plant pest including a Diabrotica plant pest, is capable of decreasing the expression of a target sequence in the pest. In specific embodiments, the decrease in expression of the target sequence controls the pest and thereby the methods and compositions are capable of limiting damage to a plant. The present invention provides various target polynucleotides as set forth in SEQ ID NOS: 1, 4, 5, 8, 9, 12, 13, 16, 17, 20, 21, 24, 25, 28, 29, 32, 33, 36, 37, 40, 41, 44, 45, 48, 49, 52, 53, 54, 55, 56, 57, 60, 61, 64, 65, 68, 69, 72, 73, 76, 77, 80, 81, 84, 85, 88, 89, 92, 93, 96, 97, 100, 101, 104, 105, 108, 109, 112, 113, 116, 117, 120, 121, 124, 125, 128, 129, 132, 133, 136, 137, 140, 141, 144, 145, 148, 149, 152, 153, 156, 157, 160, 161, 164, 165, 168, 169, 172, 173, 176, 177, 180, 181, 184, 185, 188, 189, 192, 193, 196, 197, 200, 201, 204, 205, 208, 209, 212, 213, 216, 217, 220, 221, 224, 225, 228, 229, 232, 233, 236, 237, 240, 241, 244, 245, 248, 249, 252, 253, 256, 257, 260, 261, 264, 265, 268, 269, 272, 273, 276, 277, 280, 281, 284, 285, 288, 289, 292, 293, 296, 297, 300, 301, 304, 305, 308, 309, 312, 313, 316, 317, 320, 321, 324, 325, 328, 329, 332, 333, 336, 337, 340, 341, 344, 345, 348, 349, 352, 353, 356, 357, 360, 361, 364, 365, 368, 369, 372, 373, 376, 377, 380, 381, 384, 385, 388, 389, 392, 393, 396, 397, 400, 401, 404, 405, 408, 409, 412, 413, 416, 417, 420, 421, 424, 425, 428, 429, 432, 433, 436, 437, 440, 441, 444, 445, 448, 449, 452, 453, 456, 457, 460, 461, 464, 465, 468, 469, 472, 473, 476, 477, 480, 481, 484, 485, 488, 489, 492, 493, 496, 497, 500, 501, 504, 505, 508, 509, 512, 513, 516, 517, 520, 521, 524, 525, 528, 529, 532, 533, 536, 537, 540, 541, 544, 545, 548, 549, 552, 553, 556, 557, 560, 561, 562, 563, 564, 565, 566, 567, 568, 569, 570, 571, 572, 573, 574, 575, 576, 577, 578, 579, 580, 581, 582, 583, 584, 585, 586, 587, 588, 589, 590, 591, 592, 593, 594, 595, 596, 597, 598, 599, 600, 601, 602, 603, 604, 605, 606, 607, 608, 609, 610, 611, 612, 613, 614, 615, 616, 617, 618, 619, 620, 621, 622, 623, 624, 625, 626, 627, 628, 629, 630, 631, 632, 633, 634, 635, 636, 637, 638, 639, 640, 641, 642, 643, 644, 645, 646, 647, 648, 649, 650, 651, 652, 653, 654, 655, 656, 657, 658, 659, 660, 661, 662, 663, 664, 665, 666, 667, 668, 669, 670, 671, 672, 673, 674, 675, 676, 677, 678, 679, 680, 681, 682, 683, 684, 685, 686, 687, 688, 689, 690, 691, 692, 693, 694, 695, 696, 697, 700, 701, 702, 703, 706, 707, 708, 709, 712, 713, 714, 715, 718, 719, 720, 721, or active variants or fragments thereof, or complements thereof, wherein a decrease in expression of one or more of the sequences in the target pest controls the pest (i.e., has insecticidal activity). Further provided are silencing elements, which when ingested by the pest, decrease the level of expression of one or more of the target polynucleotides. Plants, plant parts, plant cells, bacteria and other host cells comprising the silencing elements or an active variant or fragment thereof are also provided. Also provided are formulations of sprayable silencing agents for topical applications to pest insects or substrates where pest insects may be found.

[0006] In another embodiment, a method for controlling a pest, such as a Coleopteran plant pest or a Diabrotica plant pest, is provided. The method comprises feeding to a pest a composition comprising a silencing element, wherein the silencing element, when ingested by the pest, reduces the level of a target sequence in the pest and thereby controls the pest. Further provided are methods to protect a plant from a pest. Such methods comprise introducing into the plant or plant part a silencing element of the invention. When the plant expressing the silencing element is ingested by the pest, the level of the target sequence is decreased and the pest is controlled.

### BRIEF DESCRIPTION OF THE DRAWINGS

[0007] FIGS. 1A-1O are tables, Tables 1A and 1B, which identifies RNAi active targets in diet assay using dsRNA produced by in vitro transcription (IVT).

[0008] FIGS. 2A-2J are a table, Table 2, which shows design and identification of RNAi active fragments

[0009] FIGS. 3A-3C are a table, Table 3, which lists RNAi active targets from target pests, expanded pests and no target insects. Homologous sequences of selected RNAi actives were identified from transcriptome analyses of Western corn rootworm (WCRW, Diabrotica virgifera), Northern corn rootworm (NCRW, Diabrotica barberi), Southern corn rootworm (SCRW, Diabrotica undecimpunctata), Mexican Bean Beetle (MBB, Epilachna varivestis), Colorado potato beetle (CPB, Leptinotarsa decemlineata), insidious flower bug (Orius, Orius insidiosus) and Spotted Lady Beetle (CMAC, Coleomegilla maculate).

[0010] FIG. 4 is a graphic showing a sequence alignment of the amino acid sequences of WCRW Ryanr (SEQ ID NO: 724) and Drosophila Ssk (SEQ ID NO: 725).

[0011] FIG. 5 is a schematic of PAT3 fragments used in the gene and construct optimization experiment.

### DETAILED DESCRIPTION OF THE INVENTION

[0012] The present inventions now will be described more fully hereinafter with reference to the accompanying drawings, in which some, but not all embodiments of the inventions are shown. Indeed, these inventions may be embodied in many different forms and should not be construed as limited to the embodiments set forth herein; rather, these embodiments are provided so that this disclosure will satisfy applicable legal requirements. Like numbers refer to like elements throughout.

[0013] Many modifications and other embodiments of the inventions set forth herein will come to mind to one skilled in the art to which these inventions pertain having the benefit of the teachings presented in the foregoing descriptions and the associated drawings. Therefore, it is to be understood that the inventions are not to be limited to the specific embodiments disclosed and that modifications and other embodiments are intended to be included within the scope of the appended claims. Although specific terms are employed herein, they are used in a generic and descriptive sense only and not for purposes of limitation.

### 1. Overview

[0014] Frequently, RNAi discovery methods rely on evaluation of known classes of sensitive genes (transcription factors, housekeeping genes etc.). In contrast, the target polynucleotides set forth herein were identified based solely on high throughput screens of all singletons and representatives of all gene clusters from a cDNA library of neonate and/or 3^{rd} instar midgut western corn rootworms. This screen allowed for the discovery of many novel sequences, many of which have extremely low or no homology to known sequences. This method provided the advantage of having no built in bias to genes that are frequently highly conserved across taxa. As a result, many novel targets for RNAi as well as known genes not previously shown to be sensitive to RNAi have been identified.

[0015] As such, methods and compositions are provided which employ one or more silencing elements that, when ingested by a pest, such as a Coleopteran plant pest or a Diabrotica plant pest, is capable of decreasing the expression of a target sequence in the pest. In specific embodiments, the decrease in expression of the target sequence controls the pest and thereby the methods and compositions are capable of limiting damage to a plant or plant part. The present invention provides target polynucleotides as set forth in SEQ ID NOS: 1, 4, 5, 8, 9, 12, 13, 16, 17, 20, 21, 24, 25, 28, 29, 32, 33, 36, 37, 40, 41, 44, 45, 48, 49, 52, 53, 54, 55, 56, 57, 60, 61, 64, 65, 68, 69, 72, 73, 76, 77, 80, 81, 84, 85, 88, 89, 92, 93, 96, 97, 100, 101, 104, 105, 108, 109, 112, 113, 116, 117, 120, 121, 124, 125, 128, 129, 132, 133, 136, 137, 140, 141, 144, 145, 148, 149, 152, 153, 156, 157, 160, 161, 164, 165, 168, 169, 172, 173, 176, 177, 180, 181, 184, 185, 188, 189, 192, 193, 196, 197, 200, 201, 204, 205, 208, 209, 212, 213, 216, 217, 220, 221, 224, 225, 228, 229, 232, 233, 236, 237, 240, 241, 244, 245, 248, 249, 252, 253, 256, 257, 260, 261, 264, 265, 268, 269, 272, 273, 276, 277, 280, 281, 284, 285, 288, 289, 292, 293, 296, 297, 300, 301, 304, 305, 308, 309, 312, 313, 316, 317, 320, 321, 324, 325, 328, 329, 332, 333, 336, 337, 340, 341, 344, 345, 348, 349, 352, 353, 356, 357, 360, 361, 364, 365, 368, 369, 372, 373, 376, 377, 380, 381, 384, 385, 388, 389, 392, 393, 396, 397, 400, 401, 404, 405, 408, 409, 412, 413, 416, 417, 420, 421, 424, 425, 428, 429, 432, 433, 436, 437, 440, 441, 444, 445, 448, 449, 452, 453, 456, 457, 460, 461, 464, 465, 468, 469, 472, 473, 476, 477, 480, 481, 484, 485, 488, 489, 492, 493, 496, 497, 500, 501, 504, 505, 508, 509, 512, 513, 516, 517, 520, 521, 524, 525, 528, 529, 532, 533, 536, 537, 540, 541, 544, 545, 548, 549, 552, 553, 556, 557, 560, 561, 562, 563, 564, 565, 566, 567, 568, 569, 570, 571, 572, 573, 574, 575, 576, 577, 578, 579, 580, 581, 582, 583, 584, 585, 586, 587, 588, 589, 590, 591, 592, 593, 594, 595, 596, 597, 598, 599, 600, 601, 602, 603, 604, 605, 606, 607, 608, 609, 610, 611, 612, 613, 614, 615, 616, 617, 618, 619, 620, 621, 622, 623, 624, 625, 626, 627, 628, 629, 630, 631, 632, 633, 634, 635, 636, 637, 638, 639, 640, 641, 642, 643, 644, 645, 646, 647, 648, 649, 650, 651, 652, 653, 654, 655, 656, 657, 658, 659, 660, 661, 662, 663, 664, 665, 666, 667, 668, 669, 670, 671, 672, 673, 674, 675, 676, 677, 678, 679, 680, 681, 682, 683, 684, 685, 686, 687, 688, 689, 690, 691, 692, 693, 694, 695, 696, 697, 700, 701, 702, 703, 706, 707, 708, 709, 712, 713, 714, 715, 718, 719, 720, 721, or active variants and fragments thereof, and complements thereof, including, for example, SEQ ID NOS: 1, 9, 37, 45, 49, 61, 65, 77, 101, 113, 137, 141, 145, 149, 153, 157, 169, 173, 181, 185, 189, 205, 217, 225, 233, 561, 562, 563, 564, 565, 566, 567, 568, 569, 570, 571, 572, 573, 574, 575, 576, 577, 578, 579, 580, 581, 582, 583, 584, 585, 586, 587, 588, 589, 590, 591, 592, 593, 594, 595, 596, 597, 598, 599, 600, 601, 602, 603, 604, 605, 606, 607, 608, 609, 610, 611, 612, 613, 614, 615, 616, 617, 618, 619, 620, 621, 622, 623, 624, 625, 626, 627, 628, 629, 630, 631, 632, 633, 634, 635, 636, 637, 638, 639, 640, 641, 642, 643, 644, 645, 646, 647, 648, 649, 650, 651, 652, 653, 654, 655, 656, 657, 658, 659, 660, 661, 662, 663, 664, 665, 666, 667, 668, 669, 670, 671, 672, 673, 674, 675, 676, 677, 678, 679, 680, 681, 682, 683, 684, 685, 686, 687, 688, 689, 690, 691, 692, and active variants and fragments thereof, and complements thereof, and SEQ ID NOS: 4, 140, 144, 148, 693, 694, 695, 696, 697, 700, 701, 702, 703, 706, 707, 708, 709, 712, 713, 714, 715, 718, 719, 720, 721 and active variants and fragments thereof, and complements thereof. Silencing elements comprising sequences, complementary sequences, active fragments or variants of these target polynucleotides are provided which, when ingested by or when contacting the pest, decrease the expression of one or more of the target sequences and thereby controls the pest (i.e., has insecticidal activity).

[0016] As used herein, by “controlling a pest” or “controls a pest” is intended any affect on a pest that results in limiting the damage that the pest causes. Controlling a pest includes, but is not limited to, killing the pest, inhibiting development of the pest, altering fertility or growth of the pest in such a manner that the pest provides less damage to the plant, decreasing the number of offspring produced, producing less fit pests, producing pests more susceptible to predator attack, or deterring the pests from eating the plant.

[0017] Reducing the level of expression of the target polynucleotide or the polypeptide encoded thereby, in the pest results in the suppression, control, and/or killing the invading pest. Reducing the level of expression of the target sequence of the pest will reduce the pest damage by at least about 2% to at least about 6%, at least about 5% to about 50%, at least about 10% to about 60%, at least about 30% to about 70%, at least about 40% to about 80%, or at least about 50% to about 90% or greater. Hence, the methods of the invention can be utilized to control pests, particularly, Coleopteran plant pests or a Diabrotica plant pest.

[0018] Assays measuring the control of a pest are commonly known in the art, as are methods to record nodal injury score. See, for example, Oleson et al. (2005) J. Econ. Entomol. 98:1-8. See, for example, the examples below.

[0019] The invention is drawn to compositions and methods for protecting plants from a plant pest, such as Coleopteran plant pests or Diabrotica plant pests or inducing resistance in a plant to a plant pest, such as Coleopteran plant pests or Diabrotica plant pests. As used herein “Coleopteran plant pest” is used to refer to any member of the Coleoptera order. Other plant pests that may be targeted by the methods and compositions of the present invention include, but are not limited to Mexican Bean Beetle (Epilachna varivestis), and Colorado potato beetle (Leptinotarsa decemlineata),

[0020] As used herein, the term “Diabrotica plant pest” is used to refer to any member of the Diabrotica genus. Accordingly, the compositions and methods are also useful in protecting plants against any Diabrotica plant pest including, for example, Diabrotica adelpha; Diabrotica amecameca; Diabrotica balteata; Diabrotica barberi; Diabrotica biannularis; Diabrotica cristata; Diabrotica decempunctata; Diabrotica dissimilis; Diabrotica lemniscata; Diabrotica limitata (including, for example, Diabrotica limitata quindecimpuncata); Diabrotica longicornis; Diabrotica nummularis; Diabrotica porracea; Diabrotica scutellata; Diabrotica sexmaculata; Diabrotica speciosa (including, for example, Diabrotica speciosa speciosa); Diabrotica tibialis; Diabrotica undecimpunctata (including, for example, Southern corn rootworm (Diabrotica undecimpunctata), Diabrotica undecimpunctata duodecimnotata; Diabrotica undecimpunctata howardi (spotted cucumber beetle); Diabrotica undecimpunctata undecimpunctata (western spotted cucumber beetle)); Diabrotica virgifera (including, for example, Diabrotica virgifera virgifera (western corn rootworm) and Diabrotica virgifera zeae (Mexican corn rootworm)); Diabrotica viridula; Diabrotica wartensis; Diabrotica sp. JJG335; Diabrotica sp. JJG336; Diabrotica sp. JJG341; Diabrotica sp. JJG356; Diabrotica sp. JJG362; and, Diabrotica sp. JJG365.

[0021] In specific embodiments, the Diabrotica plant pest comprises D. virgifera virgifera, D. barberi, D. virgifera zeae, D. speciosa, D. speciosa or D. undecimpunctata howardi.

### II. Target Sequences

[0022] As used herein, a “target sequence” or “target polynucleotide” comprises any sequence in the pest that one desires to reduce the level of expression thereof. In specific embodiments, decreasing the level of the target sequence in the pest controls the pest. For instance, the target sequence may be essential for growth and development. While the target sequence can be expressed in any tissue of the pest, in specific embodiments, the sequences targeted for suppression in the pest are expressed in cells of the gut tissue of the pest, cells in the midgut of the pest, and cells lining the gut lumen or the midgut. Such target sequences can be involved in, for example, gut cell metabolism, growth or differentiation. Non-limiting examples of target sequences of the invention include a polynucleotide set forth in SEQ ID NOS: 1, 4, 5, 8, 9, 12, 13, 16, 17, 20, 21, 24, 25, 28, 29, 32, 33, 36, 37, 40, 41, 44, 45, 48, 49, 52, 53, 54, 55, 56, 57, 60, 61, 64, 65, 68, 69, 72, 73, 76, 77, 80, 81, 84, 85, 88, 89, 92, 93, 96, 97, 100, 101, 104, 105, 108, 109, 112, 113, 116, 117, 120, 121, 124, 125, 128, 129, 132, 133, 136, 137, 140, 141, 144, 145, 148, 149, 152, 153, 156, 157, 160, 161, 164, 165, 168, 169, 172, 173, 176, 177, 180, 181, 184, 185, 188, 189, 192, 193, 196, 197, 200, 201, 204, 205, 208, 209, 212, 213, 216, 217, 220, 221, 224, 225, 228, 229, 232, 233, 236, 237, 240, 241, 244, 245, 248, 249, 252, 253, 256, 257, 260, 261, 264, 265, 268, 269, 272, 273, 276, 277, 280, 281, 284, 285, 288, 289, 292, 293, 296, 297, 300, 301, 304, 305, 308, 309, 312, 313, 316, 317, 320, 321, 324, 325, 328, 329, 332, 333, 336, 337, 340, 341, 344, 345, 348, 349, 352, 353, 356, 357, 360, 361, 364, 365, 368, 369, 372, 373, 376, 377, 380, 381, 384, 385, 388, 389, 392, 393, 396, 397, 400, 401, 404, 405, 408, 409, 412, 413, 416, 417, 420, 421, 424, 425, 428, 429, 432, 433, 436, 437, 440, 441, 444, 445, 448, 449, 452, 453, 456, 457, 460, 461, 464, 465, 468, 469, 472, 473, 476, 477, 480, 481, 484, 485, 488, 489, 492, 493, 496, 497, 500, 501, 504, 505, 508, 509, 512, 513, 516, 517, 520, 521, 524, 525, 528, 529, 532, 533, 536, 537, 540, 541, 544, 545, 548, 549, 552, 553, 556, 557, 560, 561, 562, 563, 564, 565, 566, 567, 568, 569, 570, 571, 572, 573, 574, 575, 576, 577, 578, 579, 580, 581, 582, 583, 584, 585, 586, 587, 588, 589, 590, 591, 592, 593, 594, 595, 596, 597, 598, 599, 600, 601, 602, 603, 604, 605, 606, 607, 608, 609, 610, 611, 612, 613, 614, 615, 616, 617, 618, 619, 620, 621, 622, 623, 624, 625, 626, 627, 628, 629, 630, 631, 632, 633, 634, 635, 636, 637, 638, 639, 640, 641, 642, 643, 644, 645, 646, 647, 648, 649, 650, 651, 652, 653, 654, 655, 656, 657, 658, 659, 660, 661, 662, 663, 664, 665, 666, 667, 668, 669, 670, 671, 672, 673, 674, 675, 676, 677, 678, 679, 680, 681, 682, 683, 684, 685, 686, 687, 688, 689, 690, 691, 692, 693, 694, 695, 696, 697, 700, 701, 702, 703, 706, 707, 708, 709, 712, 713, 714, 715, 718, 719, 720, 721, or active variants and fragments thereof, and complements thereof, including, for example, SEQ ID NOS: 1, 9, 37, 45, 49, 61, 65, 77, 101, 113, 137, 141, 145, 149, 153, 157, 169, 173, 181, 185, 189, 205, 217, 225, 233, 561, 562, 563, 564, 565, 566, 567, 568, 569, 570, 571, 572, 573, 574, 575, 576, 577, 578, 579, 580, 581, 582, 583, 584, 585, 586, 587, 588, 589, 590, 591, 592, 593, 594, 595, 596, 597, 598, 599, 600, 601, 602, 603, 604, 605, 606, 607, 608, 609, 610, 611, 612, 613, 614, 615, 616, 617, 618, 619, 620, 621, 622, 623, 624, 625, 626, 627, 628, 629, 630, 631, 632, 633, 634, 635, 636, 637, 638, 639, 640, 641, 642, 643, 644, 645, 646, 647, 648, 649, 650, 651, 652, 653, 654, 655, 656, 657, 658, 659, 660, 661, 662, 663, 664, 665, 666, 667, 668, 669, 670, 671, 672, 673, 674, 675, 676, 677, 678, 679, 680, 681, 682, 683, 684, 685, 686, 687, 688, 689, 690, 691, 692, and active variants and fragments thereof, and complements thereof, and SEQ ID NOS: 4, 140, 144, 148, 693, 694, 695, 696, 697, 700, 701, 702, 703, 706, 707, 708, 709, 712, 713, 714, 715, 718, 719, 720, 721 and active variants and fragments thereof, and complements thereof. As exemplified elsewhere herein, decreasing the level of expression of one or more of these target sequences in a Coleopteran plant pest or a Diabrotica plant pest controls the pest.

### III. Silencing Elements

[0023] By “silencing element” is intended a polynucleotide which when contacted by or ingested by a pest, is capable of reducing or eliminating the level or expression of a target polynucleotide or the polypeptide encoded thereby. The silencing element employed can reduce or eliminate the expression level of the target sequence by influencing the level of the target RNA transcript or, alternatively, by influencing translation and thereby affecting the level of the encoded polypeptide. Methods to assay for functional silencing elements that are capable of reducing or eliminating the level of a sequence of interest are disclosed elsewhere herein. A single polynucleotide employed in the methods of the invention can comprise one or more silencing elements to the same or different target polynucleotides. The silencing element can be produced in vivo (i.e., in a host cell such as a plant or microorganism) or in vitro.

[0024] In specific embodiments, the target sequence is not endogenous to the plant. In other embodiments, while the silencing element controls pests, preferably the silencing element has no effect on the normal plant or plant part.

[0025] As discussed in further detail below, silencing elements can include, but are not limited to, a sense suppression element, an antisense suppression element, a double stranded RNA, a siRNA, a amiRNA, a miRNA, or a hairpin suppression element. Silencing elements of the present invention may comprise a chimera where two or more sequences of the present invention or active fragments or variants, or complements thereof, are found in the same RNA molecule. Further, a sequence of the present invention or active fragment or variant, or complement thereof, may be present as more than one copy in a DNA construct, silencing element, DNA molecule or RNA molecule. In a hairpin or dsRNA molecule, the location of a sense or antisense sequence in the molecule, for example, in which sequence is transcribed first or is located on a particular terminus of the RNA molecule, is not limiting to the invention, and the invention is not to be limited by disclosures herein of a particular location for such a sequence. Non-limiting examples of silencing elements that can be employed to decrease expression of these target Coleopteran plant pest sequences or Diabrotica plant pest sequences comprise fragments and variants of the sense or antisense sequence or consists of the sense or antisense sequence of the sequence set forth in SEQ ID NOS: 1, 4, 5, 8, 9, 12, 13, 16, 17, 20, 21, 24, 25, 28, 29, 32, 33, 36, 37, 40, 41, 44, 45, 48, 49, 52, 53, 54, 55, 56, 57, 60, 61, 64, 65, 68, 69, 72, 73, 76, 77, 80, 81, 84, 85, 88, 89, 92, 93, 96, 97, 100, 101, 104, 105, 108, 109, 112, 113, 116, 117, 120, 121, 124, 125, 128, 129, 132, 133, 136, 137, 140, 141, 144, 145, 148, 149, 152, 153, 156, 157, 160, 161, 164, 165, 168, 169, 172, 173, 176, 177, 180, 181, 184, 185, 188, 189, 192, 193, 196, 197, 200, 201, 204, 205, 208, 209, 212, 213, 216, 217, 220, 221, 224, 225, 228, 229, 232, 233, 236, 237, 240, 241, 244, 245, 248, 249, 252, 253, 256, 257, 260, 261, 264, 265, 268, 269, 272, 273, 276, 277, 280, 281, 284, 285, 288, 289, 292, 293, 296, 297, 300, 301, 304, 305, 308, 309, 312, 313, 316, 317, 320, 321, 324, 325, 328, 329, 332, 333, 336, 337, 340, 341, 344, 345, 348, 349, 352, 353, 356, 357, 360, 361, 364, 365, 368, 369, 372, 373, 376, 377, 380, 381, 384, 385, 388, 389, 392, 393, 396, 397, 400, 401, 404, 405, 408, 409, 412, 413, 416, 417, 420, 421, 424, 425, 428, 429, 432, 433, 436, 437, 440, 441, 444, 445, 448, 449, 452, 453, 456, 457, 460, 461, 464, 465, 468, 469, 472, 473, 476, 477, 480, 481, 484, 485, 488, 489, 492, 493, 496, 497, 500, 501, 504, 505, 508, 509, 512, 513, 516, 517, 520, 521, 524, 525, 528, 529, 532, 533, 536, 537, 540, 541, 544, 545, 548, 549, 552, 553, 556, 557, 560, 561, 562, 563, 564, 565, 566, 567, 568, 569, 570, 571, 572, 573, 574, 575, 576, 577, 578, 579, 580, 581, 582, 583, 584, 585, 586, 587, 588, 589, 590, 591, 592, 593, 594, 595, 596, 597, 598, 599, 600, 601, 602, 603, 604, 605, 606, 607, 608, 609, 610, 611, 612, 613, 614, 615, 616, 617, 618, 619, 620, 621, 622, 623, 624, 625, 626, 627, 628, 629, 630, 631, 632, 633, 634, 635, 636, 637, 638, 639, 640, 641, 642, 643, 644, 645, 646, 647, 648, 649, 650, 651, 652, 653, 654, 655, 656, 657, 658, 659, 660, 661, 662, 663, 664, 665, 666, 667, 668, 669, 670, 671, 672, 673, 674, 675, 676, 677, 678, 679, 680, 681, 682, 683, 684, 685, 686, 687, 688, 689, 690, 691, 692, 693, 694, 695, 696, 697, 700, 701, 702, 703, 706, 707, 708, 709, 712, 713, 714, 715, 718, 719, 720, 721, or active variants and fragments thereof, and complements thereof, including, for example, SEQ ID NOS: 1, 9, 37, 45, 49, 61, 65, 77, 101, 113, 137, 141, 145, 149, 153, 157, 169, 173, 181, 185, 189, 205, 217, 225, 233, 561, 562, 563, 564, 565, 566, 567, 568, 569, 570, 571, 572, 573, 574, 575, 576, 577, 578, 579, 580, 581, 582, 583, 584, 585, 586, 587, 588, 589, 590, 591, 592, 593, 594, 595, 596, 597, 598, 599, 600, 601, 602, 603, 604, 605, 606, 607, 608, 609, 610, 611, 612, 613, 614, 615, 616, 617, 618, 619, 620, 621, 622, 623, 624, 625, 626, 627, 628, 629, 630, 631, 632, 633, 634, 635, 636, 637, 638, 639, 640, 641, 642, 643, 644, 645, 646, 647, 648, 649, 650, 651, 652, 653, 654, 655, 656, 657, 658, 659, 660, 661, 662, 663, 664, 665, 666, 667, 668, 669, 670, 671, 672, 673, 674, 675, 676, 677, 678, 679, 680, 681, 682, 683, 684, 685, 686, 687, 688, 689, 690, 691, 692, and active variants and fragments thereof, and complements thereof, and SEQ ID NOS: 4, 140, 144, 148, 693, 694, 695, 696, 697, 700, 701, 702, 703, 706, 707, 708, 709, 712, 713, 714, 715, 718, 719, 720, 721 and active variants and fragments thereof, and complements thereof. The silencing element can further comprise additional sequences that advantageously effect transcription and/or the stability of a resulting transcript. For example, the silencing elements can comprise at least one thymine residue at the 3′ end. This can aid in stabilization. Thus, the silencing elements can have at least 1, 2, 3, 4, 5, 6, 7, 8, 9, 10 or more thymine residues at the 3′ end. As discussed in further detail below, enhancer suppressor elements can also be employed in conjunction with the silencing elements disclosed herein.

[0026] By “reduces” or “reducing” the expression level of a polynucleotide or a polypeptide encoded thereby is intended to mean, the polynucleotide or polypeptide level of the target sequence is statistically lower than the polynucleotide level or polypeptide level of the same target sequence in an appropriate control pest which is not exposed to (i.e., has not ingested or come into contact with) the silencing element. In particular embodiments of the invention, reducing the polynucleotide level and/or the polypeptide level of the target sequence in a pest according to the invention results in less than 95%, less than 90%, less than 80%, less than 70%, less than 60%, less than 50%, less than 40%, less than 30%, less than 20%, less than 10%, or less than 5% of the polynucleotide level, or the level of the polypeptide encoded thereby, of the same target sequence in an appropriate control pest. Methods to assay for the level of the RNA transcript, the level of the encoded polypeptide, or the activity of the polynucleotide or polypeptide are discussed elsewhere herein.

[0027] i. Sense Suppression Elements

[0028] As used herein, a “sense suppression element” comprises a polynucleotide designed to express an RNA molecule corresponding to at least a part of a target messenger RNA in the “sense” orientation. Expression of the RNA molecule comprising the sense suppression element reduces or eliminates the level of the target polynucleotide or the polypeptide encoded thereby. The polynucleotide comprising the sense suppression element may correspond to all or part of the sequence of the target polynucleotide, all or part of the 5′ and/or 3′ untranslated region of the target polynucleotide, all or part of the coding sequence of the target polynucleotide, or all or part of both the coding sequence and the untranslated regions of the target polynucleotide.

[0029] Typically, a sense suppression element has substantial sequence identity to the target polynucleotide, typically greater than about 65% sequence identity, greater than about 85% sequence identity, about 90%, 91%, 92%, 93%, 94%, 95%, 96%, 97%, 98% or 99% sequence identity. See, U.S. Pat. Nos. 5,283,184 and 5,034,323; herein incorporated by reference. The sense suppression element can be any length so long as it allows for the suppression of the targeted sequence. The sense suppression element can be, for example, 15, 16, 17, 18, 19, 20, 22, 25, 30, 50, 100, 150, 200, 250, 300, 350, 400, 450, 500, 600, 700, 900, 1000, 1100, 1200, 1300 nucleotides or longer of the target polynucleotides set forth in any of SEQ ID NOS: 1, 4, 5, 8, 9, 12, 13, 16, 17, 20, 21, 24, 25, 28, 29, 32, 33, 36, 37, 40, 41, 44, 45, 48, 49, 52, 53, 54, 55, 56, 57, 60, 61, 64, 65, 68, 69, 72, 73, 76, 77, 80, 81, 84, 85, 88, 89, 92, 93, 96, 97, 100, 101, 104, 105, 108, 109, 112, 113, 116, 117, 120, 121, 124, 125, 128, 129, 132, 133, 136, 137, 140, 141, 144, 145, 148, 149, 152, 153, 156, 157, 160, 161, 164, 165, 168, 169, 172, 173, 176, 177, 180, 181, 184, 185, 188, 189, 192, 193, 196, 197, 200, 201, 204, 205, 208, 209, 212, 213, 216, 217, 220, 221, 224, 225, 228, 229, 232, 233, 236, 237, 240, 241, 244, 245, 248, 249, 252, 253, 256, 257, 260, 261, 264, 265, 268, 269, 272, 273, 276, 277, 280, 281, 284, 285, 288, 289, 292, 293, 296, 297, 300, 301, 304, 305, 308, 309, 312, 313, 316, 317, 320, 321, 324, 325, 328, 329, 332, 333, 336, 337, 340, 341, 344, 345, 348, 349, 352, 353, 356, 357, 360, 361, 364, 365, 368, 369, 372, 373, 376, 377, 380, 381, 384, 385, 388, 389, 392, 393, 396, 397, 400, 401, 404, 405, 408, 409, 412, 413, 416, 417, 420, 421, 424, 425, 428, 429, 432, 433, 436, 437, 440, 441, 444, 445, 448, 449, 452, 453, 456, 457, 460, 461, 464, 465, 468, 469, 472, 473, 476, 477, 480, 481, 484, 485, 488, 489, 492, 493, 496, 497, 500, 501, 504, 505, 508, 509, 512, 513, 516, 517, 520, 521, 524, 525, 528, 529, 532, 533, 536, 537, 540, 541, 544, 545, 548, 549, 552, 553, 556, 557, 560, 561, 562, 563, 564, 565, 566, 567, 568, 569, 570, 571, 572, 573, 574, 575, 576, 577, 578, 579, 580, 581, 582, 583, 584, 585, 586, 587, 588, 589, 590, 591, 592, 593, 594, 595, 596, 597, 598, 599, 600, 601, 602, 603, 604, 605, 606, 607, 608, 609, 610, 611, 612, 613, 614, 615, 616, 617, 618, 619, 620, 621, 622, 623, 624, 625, 626, 627, 628, 629, 630, 631, 632, 633, 634, 635, 636, 637, 638, 639, 640, 641, 642, 643, 644, 645, 646, 647, 648, 649, 650, 651, 652, 653, 654, 655, 656, 657, 658, 659, 660, 661, 662, 663, 664, 665, 666, 667, 668, 669, 670, 671, 672, 673, 674, 675, 676, 677, 678, 679, 680, 681, 682, 683, 684, 685, 686, 687, 688, 689, 690, 691, 692, 693, 694, 695, 696, 697, 700, 701, 702, 703, 706, 707, 708, 709, 712, 713, 714, 715, 718, 719, 720, 721, or active variants and fragments thereof, and complements thereof, including, for example, SEQ ID NOS: 1, 9, 37, 45, 49, 61, 65, 77, 101, 113, 137, 141, 145, 149, 153, 157, 169, 173, 181, 185, 189, 205, 217, 225, 233, 561, 562, 563, 564, 565, 566, 567, 568, 569, 570, 571, 572, 573, 574, 575, 576, 577, 578, 579, 580, 581, 582, 583, 584, 585, 586, 587, 588, 589, 590, 591, 592, 593, 594, 595, 596, 597, 598, 599, 600, 601, 602, 603, 604, 605, 606, 607, 608, 609, 610, 611, 612, 613, 614, 615, 616, 617, 618, 619, 620, 621, 622, 623, 624, 625, 626, 627, 628, 629, 630, 631, 632, 633, 634, 635, 636, 637, 638, 639, 640, 641, 642, 643, 644, 645, 646, 647, 648, 649, 650, 651, 652, 653, 654, 655, 656, 657, 658, 659, 660, 661, 662, 663, 664, 665, 666, 667, 668, 669, 670, 671, 672, 673, 674, 675, 676, 677, 678, 679, 680, 681, 682, 683, 684, 685, 686, 687, 688, 689, 690, 691, 692, and active variants and fragments thereof, and complements thereof, and SEQ ID NOS: 4, 140, 144, 148, 693, 694, 695, 696, 697, 700, 701, 702, 703, 706, 707, 708, 709, 712, 713, 714, 715, 718, 719, 720, 721 and active variants and fragments thereof, and complements thereof. In other embodiments, the sense suppression element can be, for example, about 15-25, 19-35, 19-50, 25-100, 100-150, 150-200, 200-250, 250-300, 300-350, 350-400, 450-500, 500-550, 550-600, 600-650, 650-700, 700-750, 750-800, 800-850, 850-900, 900-950, 950-1000, 1000-1050, 1050-1100, 1100-1200, 1200-1300, 1300-1400, 1400-1500, 1500-1600, 1600-1700, 1700-1800 nucleotides or longer of the target polynucleotides set forth in any of SEQ ID NOS: 1, 4, 5, 8, 9, 12, 13, 16, 17, 20, 21, 24, 25, 28, 29, 32, 33, 36, 37, 40, 41, 44, 45, 48, 49, 52, 53, 54, 55, 56, 57, 60, 61, 64, 65, 68, 69, 72, 73, 76, 77, 80, 81, 84, 85, 88, 89, 92, 93, 96, 97, 100, 101, 104, 105, 108, 109, 112, 113, 116, 117, 120, 121, 124, 125, 128, 129, 132, 133, 136, 137, 140, 141, 144, 145, 148, 149, 152, 153, 156, 157, 160, 161, 164, 165, 168, 169, 172, 173, 176, 177, 180, 181, 184, 185, 188, 189, 192, 193, 196, 197, 200, 201, 204, 205, 208, 209, 212, 213, 216, 217, 220, 221, 224, 225, 228, 229, 232, 233, 236, 237, 240, 241, 244, 245, 248, 249, 252, 253, 256, 257, 260, 261, 264, 265, 268, 269, 272, 273, 276, 277, 280, 281, 284, 285, 288, 289, 292, 293, 296, 297, 300, 301, 304, 305, 308, 309, 312, 313, 316, 317, 320, 321, 324, 325, 328, 329, 332, 333, 336, 337, 340, 341, 344, 345, 348, 349, 352, 353, 356, 357, 360, 361, 364, 365, 368, 369, 372, 373, 376, 377, 380, 381, 384, 385, 388, 389, 392, 393, 396, 397, 400, 401, 404, 405, 408, 409, 412, 413, 416, 417, 420, 421, 424, 425, 428, 429, 432, 433, 436, 437, 440, 441, 444, 445, 448, 449, 452, 453, 456, 457, 460, 461, 464, 465, 468, 469, 472, 473, 476, 477, 480, 481, 484, 485, 488, 489, 492, 493, 496, 497, 500, 501, 504, 505, 508, 509, 512, 513, 516, 517, 520, 521, 524, 525, 528, 529, 532, 533, 536, 537, 540, 541, 544, 545, 548, 549, 552, 553, 556, 557, 560, 561, 562, 563, 564, 565, 566, 567, 568, 569, 570, 571, 572, 573, 574, 575, 576, 577, 578, 579, 580, 581, 582, 583, 584, 585, 586, 587, 588, 589, 590, 591, 592, 593, 594, 595, 596, 597, 598, 599, 600, 601, 602, 603, 604, 605, 606, 607, 608, 609, 610, 611, 612, 613, 614, 615, 616, 617, 618, 619, 620, 621, 622, 623, 624, 625, 626, 627, 628, 629, 630, 631, 632, 633, 634, 635, 636, 637, 638, 639, 640, 641, 642, 643, 644, 645, 646, 647, 648, 649, 650, 651, 652, 653, 654, 655, 656, 657, 658, 659, 660, 661, 662, 663, 664, 665, 666, 667, 668, 669, 670, 671, 672, 673, 674, 675, 676, 677, 678, 679, 680, 681, 682, 683, 684, 685, 686, 687, 688, 689, 690, 691, 692, 693, 694, 695, 696, 697, 700, 701, 702, 703, 706, 707, 708, 709, 712, 713, 714, 715, 718, 719, 720, 721, or active variants and fragments thereof, and complements thereof, including, for example, SEQ ID NOS: 1, 9, 37, 45, 49, 61, 65, 77, 101, 113, 137, 141, 145, 149, 153, 157, 169, 173, 181, 185, 189, 205, 217, 225, 233, 561, 562, 563, 564, 565, 566, 567, 568, 569, 570, 571, 572, 573, 574, 575, 576, 577, 578, 579, 580, 581, 582, 583, 584, 585, 586, 587, 588, 589, 590, 591, 592, 593, 594, 595, 596, 597, 598, 599, 600, 601, 602, 603, 604, 605, 606, 607, 608, 609, 610, 611, 612, 613, 614, 615, 616, 617, 618, 619, 620, 621, 622, 623, 624, 625, 626, 627, 628, 629, 630, 631, 632, 633, 634, 635, 636, 637, 638, 639, 640, 641, 642, 643, 644, 645, 646, 647, 648, 649, 650, 651, 652, 653, 654, 655, 656, 657, 658, 659, 660, 661, 662, 663, 664, 665, 666, 667, 668, 669, 670, 671, 672, 673, 674, 675, 676, 677, 678, 679, 680, 681, 682, 683, 684, 685, 686, 687, 688, 689, 690, 691, 692, and active variants and fragments thereof, and complements thereof, and SEQ ID NOS: 4, 140, 144, 148, 693, 694, 695, 696, 697, 700, 701, 702, 703, 706, 707, 708, 709, 712, 713, 714, 715, 718, 719, 720, 721 and active variants and fragments thereof, and complements thereof.

[0030] ii. Antisense Suppression Elements

[0031] As used herein, an “antisense suppression element” comprises a polynucleotide which is designed to express an RNA molecule complementary to all or part of a target messenger RNA. Expression of the antisense RNA suppression element reduces or eliminates the level of the target polynucleotide. The polynucleotide for use in antisense suppression may correspond to all or part of the complement of the sequence encoding the target polynucleotide, all or part of the complement of the 5′ and/or 3′ untranslated region of the target polynucleotide, all or part of the complement of the coding sequence of the target polynucleotide, or all or part of the complement of both the coding sequence and the untranslated regions of the target polynucleotide. In addition, the antisense suppression element may be fully complementary (i.e., 100% identical to the complement of the target sequence) or partially complementary (i.e., less than 100% identical to the complement of the target sequence) to the target polynucleotide. In specific embodiments, the antisense suppression element comprises at least 85%, 90%, 91%, 92%, 93%, 94%, 95%, 96%, 97%, 98%, or 99% sequence complementarity to the target polynucleotide. Antisense suppression may be used to inhibit the expression of multiple proteins in the same plant. See, for example, U.S. Pat. No. 5,942,657. Furthermore, the antisense suppression element can be complementary to a portion of the target polynucleotide. Generally, sequences of at least 15, 16, 17, 18, 19, 20, 22, 25, 50, 100, 200, 300, 400, 450 nucleotides or greater of the sequence set forth in any of SEQ ID NOS: 1, 4, 5, 8, 9, 12, 13, 16, 17, 20, 21, 24, 25, 28, 29, 32, 33, 36, 37, 40, 41, 44, 45, 48, 49, 52, 53, 54, 55, 56, 57, 60, 61, 64, 65, 68, 69, 72, 73, 76, 77, 80, 81, 84, 85, 88, 89, 92, 93, 96, 97, 100, 101, 104, 105, 108, 109, 112, 113, 116, 117, 120, 121, 124, 125, 128, 129, 132, 133, 136, 137, 140, 141, 144, 145, 148, 149, 152, 153, 156, 157, 160, 161, 164, 165, 168, 169, 172, 173, 176, 177, 180, 181, 184, 185, 188, 189, 192, 193, 196, 197, 200, 201, 204, 205, 208, 209, 212, 213, 216, 217, 220, 221, 224, 225, 228, 229, 232, 233, 236, 237, 240, 241, 244, 245, 248, 249, 252, 253, 256, 257, 260, 261, 264, 265, 268, 269, 272, 273, 276, 277, 280, 281, 284, 285, 288, 289, 292, 293, 296, 297, 300, 301, 304, 305, 308, 309, 312, 313, 316, 317, 320, 321, 324, 325, 328, 329, 332, 333, 336, 337, 340, 341, 344, 345, 348, 349, 352, 353, 356, 357, 360, 361, 364, 365, 368, 369, 372, 373, 376, 377, 380, 381, 384, 385, 388, 389, 392, 393, 396, 397, 400, 401, 404, 405, 408, 409, 412, 413, 416, 417, 420, 421, 424, 425, 428, 429, 432, 433, 436, 437, 440, 441, 444, 445, 448, 449, 452, 453, 456, 457, 460, 461, 464, 465, 468, 469, 472, 473, 476, 477, 480, 481, 484, 485, 488, 489, 492, 493, 496, 497, 500, 501, 504, 505, 508, 509, 512, 513, 516, 517, 520, 521, 524, 525, 528, 529, 532, 533, 536, 537, 540, 541, 544, 545, 548, 549, 552, 553, 556, 557, 560, 561, 562, 563, 564, 565, 566, 567, 568, 569, 570, 571, 572, 573, 574, 575, 576, 577, 578, 579, 580, 581, 582, 583, 584, 585, 586, 587, 588, 589, 590, 591, 592, 593, 594, 595, 596, 597, 598, 599, 600, 601, 602, 603, 604, 605, 606, 607, 608, 609, 610, 611, 612, 613, 614, 615, 616, 617, 618, 619, 620, 621, 622, 623, 624, 625, 626, 627, 628, 629, 630, 631, 632, 633, 634, 635, 636, 637, 638, 639, 640, 641, 642, 643, 644, 645, 646, 647, 648, 649, 650, 651, 652, 653, 654, 655, 656, 657, 658, 659, 660, 661, 662, 663, 664, 665, 666, 667, 668, 669, 670, 671, 672, 673, 674, 675, 676, 677, 678, 679, 680, 681, 682, 683, 684, 685, 686, 687, 688, 689, 690, 691, 692, 693, 694, 695, 696, 697, 700, 701, 702, 703, 706, 707, 708, 709, 712, 713, 714, 715, 718, 719, 720, 721, or active variants and fragments thereof, and complements thereof, including, for example, SEQ ID NOS: 1, 9, 37, 45, 49, 61, 65, 77, 101, 113, 137, 141, 145, 149, 153, 157, 169, 173, 181, 185, 189, 205, 217, 225, 233, 561, 562, 563, 564, 565, 566, 567, 568, 569, 570, 571, 572, 573, 574, 575, 576, 577, 578, 579, 580, 581, 582, 583, 584, 585, 586, 587, 588, 589, 590, 591, 592, 593, 594, 595, 596, 597, 598, 599, 600, 601, 602, 603, 604, 605, 606, 607, 608, 609, 610, 611, 612, 613, 614, 615, 616, 617, 618, 619, 620, 621, 622, 623, 624, 625, 626, 627, 628, 629, 630, 631, 632, 633, 634, 635, 636, 637, 638, 639, 640, 641, 642, 643, 644, 645, 646, 647, 648, 649, 650, 651, 652, 653, 654, 655, 656, 657, 658, 659, 660, 661, 662, 663, 664, 665, 666, 667, 668, 669, 670, 671, 672, 673, 674, 675, 676, 677, 678, 679, 680, 681, 682, 683, 684, 685, 686, 687, 688, 689, 690, 691, 692, and active variants and fragments thereof, and complements thereof, and SEQ ID NOS: 4, 140, 144, 148, 693, 694, 695, 696, 697, 700, 701, 702, 703, 706, 707, 708, 709, 712, 713, 714, 715, 718, 719, 720, 721 and active variants and fragments thereof, and complements thereof may be used. Methods for using antisense suppression to inhibit the expression of endogenous genes in plants are described, for example, in Liu et al (2002) Plant Physiol. 129:1732-1743 and U.S. Pat. Nos. 5,759,829 and 5,942,657, each of which is herein incorporated by reference.

[0032] iii. Double Stranded RNA Suppression Element

[0033] A “double stranded RNA silencing element” or “dsRNA” comprises at least one transcript that is capable of forming a dsRNA either before or after ingestion by a pest. Thus, a “dsRNA silencing element” includes a dsRNA, a transcript or polyribonucleotide capable of forming a dsRNA or more than one transcript or polyribonucleotide capable of forming a dsRNA. “Double stranded RNA” or “dsRNA” refers to a polyribonucleotide structure formed either by a single self-complementary RNA molecule or a polyribonucleotide structure formed by the expression of at least two distinct RNA strands. The dsRNA molecule(s) employed in the methods and compositions of the invention mediate the reduction of expression of a target sequence, for example, by mediating RNA interference “RNAi” or gene silencing in a sequence-specific manner. In the context of the present invention, the dsRNA is capable of reducing or eliminating the level or expression of a target polynucleotide or the polypeptide encoded thereby in a pest.

[0034] The dsRNA can reduce or eliminate the expression level of the target sequence by influencing the level of the target RNA transcript, by influencing translation and thereby affecting the level of the encoded polypeptide, or by influencing expression at the pre-transcriptional level (i.e., via the modulation of chromatin structure, methylation pattern, etc., to alter gene expression). See, for example, Verdel et al. (2004) Science 303:672-676; Pal-Bhadra et al. (2004) Science 303:669-672; Allshire (2002) Science 297:1818-1819; Volpe et al. (2002) Science 297:1833-1837; Jenuwein (2002) Science 297:2215-2218; and Hall et al. (2002) Science 297:2232-2237. Methods to assay for functional dsRNA that are capable of reducing or eliminating the level of a sequence of interest are disclosed elsewhere herein. Accordingly, as used herein, the term “dsRNA” is meant to encompass other terms used to describe nucleic acid molecules that are capable of mediating RNA interference or gene silencing, including, for example, short-interfering RNA (siRNA), double-stranded RNA (dsRNA), micro-RNA (miRNA), hairpin RNA, short hairpin RNA (shRNA), post-transcriptional gene silencing RNA (ptgsRNA), and others.

[0035] In specific embodiments, at least one strand of the duplex or double-stranded region of the dsRNA shares sufficient sequence identity or sequence complementarity to the target polynucleotide to allow for the dsRNA to reduce the level of expression of the target sequence. As used herein, the strand that is complementary to the target polynucleotide is the “antisense strand” and the strand homologous to the target polynucleotide is the “sense strand.”

[0036] In another embodiment, the dsRNA comprises a hairpin RNA. A hairpin RNA comprises an RNA molecule that is capable of folding back onto itself to form a double stranded structure. Multiple structures can be employed as hairpin elements. In specific embodiments, the dsRNA suppression element comprises a hairpin element which comprises in the following order, a first segment, a second segment, and a third segment, where the first and the third segment share sufficient complementarity to allow the transcribed RNA to form a double-stranded stem-loop structure.

[0037] The “second segment” of the hairpin comprises a “loop” or a “loop region.” These terms are used synonymously herein and are to be construed broadly to comprise any nucleotide sequence that confers enough flexibility to allow self-pairing to occur between complementary regions of a polynucleotide (i.e., segments 1 and 3 which form the stem of the hairpin). For example, in some embodiments, the loop region may be substantially single stranded and act as a spacer between the self-complementary regions of the hairpin stem-loop. In some embodiments, the loop region can comprise a random or nonsense nucleotide sequence and thus not share sequence identity to a target polynucleotide. In other embodiments, the loop region comprises a sense or an antisense RNA sequence or fragment thereof that shares identity to a target polynucleotide. See, for example, International Patent Publication No. WO 02/00904, herein incorporated by reference. In specific embodiments, the loop region can be optimized to be as short as possible while still providing enough intramolecular flexibility to allow the formation of the base-paired stem region. Accordingly, the loop sequence is generally less than 1000, 900, 800, 700, 600, 500, 400, 300, 200, 100, 50, 25, 20, 19, 18, 17, 16, 15, 10 nucleotides or less.

[0038] The “first” and the “third” segment of the hairpin RNA molecule comprise the base-paired stem of the hairpin structure. The first and the third segments are inverted repeats of one another and share sufficient complementarity to allow the formation of the base-paired stem region. In specific embodiments, the first and the third segments are fully complementary to one another. Alternatively, the first and the third segment may be partially complementary to each other so long as they are capable of hybridizing to one another to form a base-paired stem region. The amount of complementarity between the first and the third segment can be calculated as a percentage of the entire segment. Thus, the first and the third segment of the hairpin RNA generally share at least 50%, 60%, 70%, 80%, 85%, 90%, 91%, 92%, 93%, 94%, 95%, 96%, 97%, 98%, 99%, up to and including 100% complementarity.

[0039] The first and the third segment are at least about 1000, 500, 475, 450, 425, 400, 375, 350, 325, 300, 250, 225, 200, 175, 150, 125, 100, 75, 60, 50, 40, 30, 25, 22, 20, 19, 18, 17, 16, 15 or 10 nucleotides in length. In specific embodiments, the length of the first and/or the third segment is about 10-100 nucleotides, about 10 to about 75 nucleotides, about 10 to about 50 nucleotides, about 10 to about 40 nucleotides, about 10 to about 35 nucleotides, about 10 to about 30 nucleotides, about 10 to about 25 nucleotides, about 10 to about 19 nucleotides, about 10 to about 20 nucleotides, about 19 to about 50 nucleotides, about 50 nucleotides to about 100 nucleotides, about 100 nucleotides to about 150 nucleotides, about 100 nucleotides to about 300 nucleotides, about 150 nucleotides to about 200 nucleotides, about 200 nucleotides to about 250 nucleotides, about 250 nucleotides to about 300 nucleotides, about 300 nucleotides to about 350 nucleotides, about 350 nucleotides to about 400 nucleotides, about 400 nucleotide to about 500 nucleotides, about 600 nt, about 700 nt, about 800 nt, about 900 nt, about 1000 nt, about 1100 nt, about 1200 nt, 1300 nt, 1400 nt, 1500 nt, 1600 nt, 1700 nt, 1800 nt, 1900 nt, 2000 nt or longer. In other embodiments, the length of the first and/or the third segment comprises at least 10-19 nucleotides, 10-20 nucleotides; 19-35 nucleotides, 20-35 nucleotides; 30-45 nucleotides; 40-50 nucleotides; 50-100 nucleotides; 100-300 nucleotides; about 500-700 nucleotides; about 700-900 nucleotides; about 900-1100 nucleotides; about 1300-1500 nucleotides; about 1500-1700 nucleotides; about 1700-1900 nucleotides; about 1900-2100 nucleotides; about 2100-2300 nucleotides; or about 2300-2500 nucleotides. See, for example, International Publication No. WO 0200904.

[0040] Hairpin molecules or double-stranded RNA molecules of the present invention may have more than one sequence of the present invention or active fragments or variants, or complements thereof, found in the same portion of the RNA molecule. For example, in a chimeric hairpin structure, the first segment of a hairpin molecule comprises two polynucleotide sections, each with a different sequence of the present invention. For example, reading from one terminus of the hairpin, the first segment is composed of sequences from two separate genes (A followed by B). This first segment is followed by the second segment, the loop portion of the hairpin. The loop segment is followed by the third segment, where the complementary strands of the sequences in the first segment are found (B* followed by A*) in forming the stem-loop, hairpin structure, the stem contains SeqA-A* at the distal end of the stem and SeqB-B* proximal to the loop region.

[0041] In specific embodiments, the first and the third segment comprise at least 20 nucleotides having at least 85% complementary to the first segment. In still other embodiments, the first and the third segments which form the stem-loop structure of the hairpin comprises 3′ or 5′ overhang regions having unpaired nucleotide residues.

[0042] In specific embodiments, the sequences used in the first, the second, and/or the third segments comprise domains that are designed to have sufficient sequence identity to a target polynucleotide of interest and thereby have the ability to decrease the level of expression of the target polynucleotide. The specificity of the inhibitory RNA transcripts is therefore generally conferred by these domains of the silencing element. Thus, in some embodiments of the invention, the first, second and/or third segment of the silencing element comprise a domain having at least 10, at least 15, at least 19, at least 20, at least 21, at least 22, at least 23, at least 24, at least 25, at least 30, at least 40, at least 50, at least 100, at least 200, at least 300, at least 500, at least 1000, or more than 1000 nucleotides that share sufficient sequence identity to the target polynucleotide to allow for a decrease in expression levels of the target polynucleotide when expressed in an appropriate cell. In other embodiments, the domain is between about 15 to 50 nucleotides, about 19-35 nucleotides, about 20-35 nucleotides, about 25-50 nucleotides, about 19 to 75 nucleotides, about 20 to 75 nucleotides, about 40-90 nucleotides about 15-100 nucleotides 10-100 nucleotides, about 10 to about 75 nucleotides, about 10 to about 50 nucleotides, about 10 to about 40 nucleotides, about 10 to about 35 nucleotides, about 10 to about 30 nucleotides, about 10 to about 25 nucleotides, about 10 to about 20 nucleotides, about 10 to about 19 nucleotides, about 50 nucleotides to about 100 nucleotides, about 100 nucleotides to about 150 nucleotides, about 150 nucleotides to about 200 nucleotides, about 200 nucleotides to about 250 nucleotides, about 250 nucleotides to about 300 nucleotides, about 300 nucleotides to about 350 nucleotides, about 350 nucleotides to about 400 nucleotides, about 400 nucleotide to about 500 nucleotides or longer. In other embodiments, the length of the first and/or the third segment comprises at least 10-20 nucleotides, at least 10-19 nucleotides, 20-35 nucleotides, 30-45 nucleotides, 40-50 nucleotides, 50-100 nucleotides, or about 100-300 nucleotides.

[0043] In specific embodiments, the domain of the first, the second, and/or the third segment has 100% sequence identity to the target polynucleotide. In other embodiments, the domain of the first, the second and/or the third segment having homology to the target polypeptide have at least 50%, 60%, 70%, 80%, 85%, 90%, 91%, 92%, 93%, 94%, 95%, 96%, 97%, 98%, 99%, or greater sequence identity to a region of the target polynucleotide. The sequence identity of the domains of the first, the second and/or the third segments to the target polynucleotide need only be sufficient to decrease expression of the target polynucleotide of interest. See, for example, Chuang and Meyerowitz (2000) Proc. Natl. Acad. Sci. USA 97:4985-4990; Stoutjesdijk et al. (2002) Plant Physiol. 129:1723-1731; Waterhouse and Helliwell (2003) Nat. Rev. Genet. 4:29-38; Pandolfini et al. BMC Biotechnology 3:7, and U.S. Patent Publication No. 20030175965; each of which is herein incorporated by reference. A transient assay for the efficiency of hpRNA constructs to silence gene expression in vivo has been described by Panstruga et al. (2003) Mol. Biol. Rep. 30:135-140, herein incorporated by reference.

[0044] The amount of complementarity shared between the first, second, and/or third segment and the target polynucleotide or the amount of complementarity shared between the first segment and the third segment (i.e., the stem of the hairpin structure) may vary depending on the organism in which gene expression is to be controlled. Some organisms or cell types may require exact pairing or 100% identity, while other organisms or cell types may tolerate some mismatching. In some cells, for example, a single nucleotide mismatch in the targeting sequence abrogates the ability to suppress gene expression. In these cells, the suppression cassettes of the invention can be used to target the suppression of mutant genes, for example, oncogenes whose transcripts comprise point mutations and therefore they can be specifically targeted using the methods and compositions of the invention without altering the expression of the remaining wild-type allele. In other organisms, holistic sequence variability may be tolerated as long as some 22nt region of the sequence is represented in 100% homology between target polynucleitide and the suppression cassette.

[0045] Any region of the target polynucleotide can be used to design the domain of the silencing element that shares sufficient sequence identity to allow expression of the hairpin transcript to decrease the level of the target polynucleotide. For instance, the domain can be designed to share sequence identity to the 5′ untranslated region of the target polynucleotide(s), the 3′ untranslated region of the target polynucleotide(s), exonic regions of the target polynucleotide(s), intronic regions of the target polynucleotide(s), and any combination thereof. In specific embodiments, a domain of the silencing element shares sufficient homology to at least about 15, 16, 17, 18, 19, 20, 22, 25 or 30 consecutive nucleotides from about nucleotides 1-50, 25-75, 75-125, 50-100, 125-175, 175-225, 100-150, 150-200, 200-250, 225-275, 275-325, 250-300, 325-375, 375-425, 300-350, 350-400, 425-475, 400-450, 475-525, 450-500, 525-575, 575-625, 550-600, 625-675, 675-725, 600-650, 625-675, 675-725, 650-700, 725-825, 825-875, 750-800, 875-925, 925-975, 850-900, 925-975, 975-1025, 950-1000, 1000-1050, 1025-1075, 1075-1125, 1050-1100, 1125-1175, 1100-1200, 1175-1225, 1225-1275, 1200-1300, 1325-1375, 1375-1425, 1300-1400, 1425-1475, 1475-1525, 1400-1500, 1525-1575, 1575-1625, 1625-1675, 1675-1725, 1725-1775, 1775-1825, 1825-1875, 1875-1925, 1925-1975, 1975-2025, 2025-2075, 2075-2125, 2125-2175, 2175-2225, 1500-1600, 1600-1700, 1700-1800, 1800-1900, 1900-2000 of the target sequence. In some instances to optimize the siRNA sequences employed in the hairpin, the synthetic oligodeoxyribonucleotide/RNAse H method can be used to determine sites on the target mRNA that are in a conformation that is susceptible to RNA silencing. See, for example, Vickers et al. (2003) J. Biol. Chem 278:7108-7118 and Yang et al. (2002) Proc. Natl. Acad. Sci. USA 99:9442-9447, herein incorporated by reference. These studies indicate that there is a significant correlation between the RNase-H-sensitive sites and sites that promote efficient siRNA-directed mRNA degradation.

[0046] The hairpin silencing element may also be designed such that the sense sequence or the antisense sequence do not correspond to a target polynucleotide. In this embodiment, the sense and antisense sequence flank a loop sequence that comprises a nucleotide sequence corresponding to all or part of the target polynucleotide. Thus, it is the loop region that determines the specificity of the RNA interference. See, for example, WO 02/00904, herein incorporated by reference.

[0047] In addition, transcriptional gene silencing (TGS) may be accomplished through use of a hairpin suppression element where the inverted repeat of the hairpin shares sequence identity with the promoter region of a target polynucleotide to be silenced. See, for example, Aufsatz et al. (2002) PNAS 99 (Suppl. 4):16499-16506 and Mette et al. (2000) EMBO J 19(19):5194-5201.

[0048] In other embodiments, the silencing element can comprise a small RNA (sRNA). sRNAs can comprise both micro RNA (miRNA) and short-interfering RNA (siRNA) (Meister and Tuschl (2004) Nature 431:343-349 and Bonetta et al. (2004) Nature Methods 1:79-86). miRNAs are regulatory agents comprising about 19 to about 24 ribonucleotides in length which are highly efficient at inhibiting the expression of target polynucleotides. See, for example Javier et al. (2003) Nature 425: 257-263, herein incorporated by reference. For miRNA interference, the silencing element can be designed to express a dsRNA molecule that forms a hairpin structure or partially base-paired structure containing 19, 20, 21, 22, 23, 24 or 25-nucleotide sequence that is complementary to the target polynucleotide of interest. The miRNA can be synthetically made, or transcribed as a longer RNA which is subsequently cleaved to produce the active miRNA. Specifically, the miRNA can comprise 19 nucleotides of the sequence having homology to a target polynucleotide in sense orientation and 19 nucleotides of a corresponding antisense sequence that is complementary to the sense sequence. The miRNA can be an “artificial miRNA” or “amiRNA” which comprises a miRNA sequence that is synthetically designed to silence a target sequence.

[0049] When expressing an miRNA the final (mature) miRNA is present in a duplex in a precursor backbone structure, the two strands being referred to as the miRNA (the strand that will eventually basepair with the target) and miRNA*(star sequence). It has been demonstrated that miRNAs can be transgenically expressed and target genes of interest efficiently silenced (Highly specific gene silencing by artificial microRNAs in Arabidopsis Schwab R, Ossowski S, Riester M, Warthmann N, Weigel D. Plant Cell. 2006 May; 18(5):1121-33. Epub 2006 Mar. 10 & Expression of artificial microRNAs in transgenic Arabidopsis thaliana confers virus resistance. Niu Q W, Lin S S, Reyes J L, Chen K C, Wu H W, Yeh S D, Chua N H. Nat Biotechnol. 2006 November; 24(11):1420-8. Epub 2006 Oct. 22. Erratum in: Nat Biotechnol. 2007 February; 25(2):254.)

[0050] The silencing element for miRNA interference comprises a miRNA primary sequence. The miRNA primary sequence comprises a DNA sequence having the miRNA and star sequences separated by a loop as well as additional sequences flanking this region that are important for processing. When expressed as an RNA, the structure of the primary miRNA is such as to allow for the formation of a hairpin RNA structure that can be processed into a mature miRNA. In some embodiments, the miRNA backbone comprises a genomic or cDNA miRNA precursor sequence, wherein said sequence comprises a native primary in which a heterologous (artificial) mature miRNA and star sequence are inserted.

[0051] As used herein, a “star sequence” is the sequence within a miRNA precursor backbone that is complementary to the miRNA and forms a duplex with the miRNA to form the stem structure of a hairpin RNA. In some embodiments, the star sequence can comprise less than 100% complementarity to the miRNA sequence. Alternatively, the star sequence can comprise at least 99%, 98%, 97%, 96%, 95%, 90%, 85%, 80% or lower sequence complementarity to the miRNA sequence as long as the star sequence has sufficient complementarity to the miRNA sequence to form a double stranded structure. In still further embodiments, the star sequence comprises a sequence having 1, 2, 3, 4, 5 or more mismatches with the miRNA sequence and still has sufficient complementarity to form a double stranded structure with the miRNA sequence resulting in production of miRNA and suppression of the target sequence.

[0052] The miRNA precursor backbones can be from any plant. In some embodiments, the miRNA precursor backbone is from a monocot. In other embodiments, the miRNA precursor backbone is from a dicot. In further embodiments, the backbone is from maize or soybean. MicroRNA precursor backbones have been described previously. For example, US20090155910A1 (WO 2009/079532) discloses the following soybean miRNA precursor backbones: 156c, 159, 166b, 168c, 396b and 398b, and US20090155909A1 (WO 2009/079548) discloses the following maize miRNA precursor backbones: 159c, 164h, 168a, 169r, and 396h. Each of these references is incorporated by reference in their entirety.

[0053] Thus, the primary miRNA can be altered to allow for efficient insertion of heterologous miRNA and star sequences within the miRNA precursor backbone. In such instances, the miRNA segment and the star segment of the miRNA precursor backbone are replaced with the heterologous miRNA and the heterologous star sequences, designed to target any sequence of interest, using a PCR technique and cloned into an expression construct. It is recognized that there could be alterations to the position at which the artificial miRNA and star sequences are inserted into the backbone. Detailed methods for inserting the miRNA and star sequence into the miRNA precursor backbone are described in, for example, US Patent Applications 20090155909A1 and US20090155910A1, herein incorporated by reference in their entirety.

[0054] When designing a miRNA sequence and star sequence, various design choices can be made. See, for example, Schwab R, et al. (2005) Dev Cell 8: 517-27. In non-limiting embodiments, the miRNA sequences disclosed herein can have a “U” at the 5′-end, a “C” or “G” at the 19th nucleotide position, and an “A” or “U” at the 10th nucleotide position. In other embodiments, the miRNA design is such that the miRNA have a high free delta-G as calculated using the ZipFold algorithm (Markham, N. R. & Zuker, M. (2005) Nucleic Acids Res. 33: W577-W581.) Optionally, a one base pair change can be added within the 5′ portion of the miRNA so that the sequence differs from the target sequence by one nucleotide.

[0055] The methods and compositions of the invention employ silencing elements that when transcribed “form” a dsRNA molecule. Accordingly, the heterologous polynucleotide being expressed need not form the dsRNA by itself, but can interact with other sequences in the plant cell or in the pest gut after ingestion to allow the formation of the dsRNA. For example, a chimeric polynucleotide that can selectively silence the target polynucleotide can be generated by expressing a chimeric construct comprising the target sequence for a miRNA or siRNA to a sequence corresponding to all or part of the gene or genes to be silenced. In this embodiment, the dsRNA is “formed” when the target for the miRNA or siRNA interacts with the miRNA present in the cell. The resulting dsRNA can then reduce the level of expression of the gene or genes to be silenced. See, for example, US Application Publication 2007-0130653, entitled “Methods and Compositions for Gene Silencing”, herein incorporated by reference. The construct can be designed to have a target for an endogenous miRNA or alternatively, a target for a heterologous and/or synthetic miRNA can be employed in the construct. If a heterologous and/or synthetic miRNA is employed, it can be introduced into the cell on the same nucleotide construct as the chimeric polynucleotide or on a separate construct. As discussed elsewhere herein, any method can be used to introduce the construct comprising the heterologous miRNA.

e. Silencing Elements

[0056] A silencing element may comprise a chimeric construction molecule comprising two or more sequences of the present invention. For example, the chimeric construction may be a hairpin or dsRNA as disclosed herein. A chimera may comprise two or more sequences of the present invention. Providing at least two different sequences in a single silencing element may allow for targeting multiple genes using one silencing element and/or for example, one expression cassette. Targeting multiple genes may allow for slowing or reducing the possibility of resistance by the pest, and providing the multiple targeting ability in one expressed molecule may reduce the expression burden of the transformed plant or plant product, or provide topical treatments that are capable of targeting multiple hosts with one application.

### IV. Variants and Fragments

[0057] By “fragment” is intended a portion of the polynucleotide or a portion of the amino acid sequence and hence protein encoded thereby. Fragments of a polynucleotide may encode protein fragments that retain the biological activity of the native protein. Alternatively, fragments of a polynucleotide that are useful as a silencing element do not need to encode fragment proteins that retain biological activity. Thus, fragments of a nucleotide sequence may range from at least about 10, about 15, about 16, about 17, about 18, about 19, nucleotides, about 20 nucleotides, about 22 nucleotides, about 50 nucleotides, about 75 nucleotides, about 100 nucleotides, 200 nucleotides, 300 nucleotides, 400 nucleotides, 500 nucleotides, 600 nucleotides, 700 nucleotides and up to the full-length polynucleotide employed in the invention. Alternatively, fragments of a nucleotide sequence may range from 1-50, 25-75, 75-125, 50-100, 125-175, 175-225, 100-150, 100-300, 150-200, 200-250, 225-275, 275-325, 250-300, 325-375, 375-425, 300-350, 350-400, 425-475, 400-450, 475-525, 450-500, 525-575, 575-625, 550-600, 625-675, 675-725, 600-650, 625-675, 675-725, 650-700, 725-825, 825-875, 750-800, 875-925, 925-975, 850-900, 925-975, 975-1025, 950-1000, 1000-1050, 1025-1075, 1075-1125, 1050-1100, 1125-1175, 1100-1200, 1175-1225, 1225-1275, 1200-1300, 1325-1375, 1375-1425, 1300-1400, 1425-1475, 1475-1525, 1400-1500, 1525-1575, 1575-1625, 1625-1675, 1675-1725, 1725-1775, 1775-1825, 1825-1875, 1875-1925, 1925-1975, 1975-2025, 2025-2075, 2075-2125, 2125-2175, 2175-2225, 1500-1600, 1600-1700, 1700-1800, 1800-1900, 1900-2000 of any one of SEQ ID NOS: 1, 4, 5, 8, 9, 12, 13, 16, 17, 20, 21, 24, 25, 28, 29, 32, 33, 36, 37, 40, 41, 44, 45, 48, 49, 52, 53, 54, 55, 56, 57, 60, 61, 64, 65, 68, 69, 72, 73, 76, 77, 80, 81, 84, 85, 88, 89, 92, 93, 96, 97, 100, 101, 104, 105, 108, 109, 112, 113, 116, 117, 120, 121, 124, 125, 128, 129, 132, 133, 136, 137, 140, 141, 144, 145, 148, 149, 152, 153, 156, 157, 160, 161, 164, 165, 168, 169, 172, 173, 176, 177, 180, 181, 184, 185, 188, 189, 192, 193, 196, 197, 200, 201, 204, 205, 208, 209, 212, 213, 216, 217, 220, 221, 224, 225, 228, 229, 232, 233, 236, 237, 240, 241, 244, 245, 248, 249, 252, 253, 256, 257, 260, 261, 264, 265, 268, 269, 272, 273, 276, 277, 280, 281, 284, 285, 288, 289, 292, 293, 296, 297, 300, 301, 304, 305, 308, 309, 312, 313, 316, 317, 320, 321, 324, 325, 328, 329, 332, 333, 336, 337, 340, 341, 344, 345, 348, 349, 352, 353, 356, 357, 360, 361, 364, 365, 368, 369, 372, 373, 376, 377, 380, 381, 384, 385, 388, 389, 392, 393, 396, 397, 400, 401, 404, 405, 408, 409, 412, 413, 416, 417, 420, 421, 424, 425, 428, 429, 432, 433, 436, 437, 440, 441, 444, 445, 448, 449, 452, 453, 456, 457, 460, 461, 464, 465, 468, 469, 472, 473, 476, 477, 480, 481, 484, 485, 488, 489, 492, 493, 496, 497, 500, 501, 504, 505, 508, 509, 512, 513, 516, 517, 520, 521, 524, 525, 528, 529, 532, 533, 536, 537, 540, 541, 544, 545, 548, 549, 552, 553, 556, 557, 560, 561, 562, 563, 564, 565, 566, 567, 568, 569, 570, 571, 572, 573, 574, 575, 576, 577, 578, 579, 580, 581, 582, 583, 584, 585, 586, 587, 588, 589, 590, 591, 592, 593, 594, 595, 596, 597, 598, 599, 600, 601, 602, 603, 604, 605, 606, 607, 608, 609, 610, 611, 612, 613, 614, 615, 616, 617, 618, 619, 620, 621, 622, 623, 624, 625, 626, 627, 628, 629, 630, 631, 632, 633, 634, 635, 636, 637, 638, 639, 640, 641, 642, 643, 644, 645, 646, 647, 648, 649, 650, 651, 652, 653, 654, 655, 656, 657, 658, 659, 660, 661, 662, 663, 664, 665, 666, 667, 668, 669, 670, 671, 672, 673, 674, 675, 676, 677, 678, 679, 680, 681, 682, 683, 684, 685, 686, 687, 688, 689, 690, 691, 692, 693, 694, 695, 696, 697, 700, 701, 702, 703, 706, 707, 708, 709, 712, 713, 714, 715, 718, 719, 720, 721, or active variants and fragments thereof, and complements thereof, including, for example, SEQ ID NOS: 1, 9, 37, 45, 49, 61, 65, 77, 101, 113, 137, 141, 145, 149, 153, 157, 169, 173, 181, 185, 189, 205, 217, 225, 233, 561, 562, 563, 564, 565, 566, 567, 568, 569, 570, 571, 572, 573, 574, 575, 576, 577, 578, 579, 580, 581, 582, 583, 584, 585, 586, 587, 588, 589, 590, 591, 592, 593, 594, 595, 596, 597, 598, 599, 600, 601, 602, 603, 604, 605, 606, 607, 608, 609, 610, 611, 612, 613, 614, 615, 616, 617, 618, 619, 620, 621, 622, 623, 624, 625, 626, 627, 628, 629, 630, 631, 632, 633, 634, 635, 636, 637, 638, 639, 640, 641, 642, 643, 644, 645, 646, 647, 648, 649, 650, 651, 652, 653, 654, 655, 656, 657, 658, 659, 660, 661, 662, 663, 664, 665, 666, 667, 668, 669, 670, 671, 672, 673, 674, 675, 676, 677, 678, 679, 680, 681, 682, 683, 684, 685, 686, 687, 688, 689, 690, 691, 692, and active variants and fragments thereof, and complements thereof, and SEQ ID NOS: 4, 140, 144, 148, 693, 694, 695, 696, 697, 700, 701, 702, 703, 706, 707, 708, 709, 712, 713, 714, 715, 718, 719, 720, 721 and active variants and fragments thereof, and complements thereof. Methods to assay for the activity of a desired silencing element are described elsewhere herein.

[0058] “Variants” is intended to mean substantially similar sequences. For polynucleotides, a variant comprises a deletion and/or addition of one or more nucleotides at one or more internal sites within the native polynucleotide and/or a substitution of one or more nucleotides at one or more sites in the native polynucleotide. A variant of a polynucleotide that is useful as a silencing element will retain the ability to reduce expression of the target polynucleotide and, in some embodiments, thereby control a pest of interest. As used herein, a “native” polynucleotide or polypeptide comprises a naturally occurring nucleotide sequence or amino acid sequence, respectively. For polynucleotides, conservative variants include those sequences that, because of the degeneracy of the genetic code, encode the amino acid sequence of one of the polypeptides employed in the invention. Variant polynucleotides also include synthetically derived polynucleotide, such as those generated, for example, by using site-directed mutagenesis, but continue to retain the desired activity. Generally, variants of a particular polynucleotide of the invention (i.e., a silencing element) will have at least about 40%, 45%, 50%, 55%, 60%, 65%, 70%, 75%, 80%, 85%, 90%, 91%, 92%, 93%, 94%, 95%, 96%, 97%, 98%, 99% or more sequence identity to that particular polynucleotide as determined by sequence alignment programs and parameters described elsewhere herein.

[0059] Variants of a particular polynucleotide of the invention (i.e., the reference polynucleotide) can also be evaluated by comparison of the percent sequence identity between the polypeptide encoded by a variant polynucleotide and the polypeptide encoded by the reference polynucleotide. Percent sequence identity between any two polypeptides can be calculated using sequence alignment programs and parameters described elsewhere herein. Where any given pair of polynucleotides employed in the invention is evaluated by comparison of the percent sequence identity shared by the two polypeptides they encode, the percent sequence identity between the two encoded polypeptides is at least about 40%, 45%, 50%, 55%, 60%, 65%, 70%, 75%, 80%, 85%, 90%, 91%, 92%, 93%, 94%, 95%, 96%, 97%, 98%, 99% or more sequence identity.

[0060] The following terms are used to describe the sequence relationships between two or more polynucleotides or polypeptides: (a) “reference sequence”, (b) “comparison window”, (c) “sequence identity”, and, (d) “percentage of sequence identity.”

[0061] (a) As used herein, “reference sequence” is a defined sequence used as a basis for sequence comparison. A reference sequence may be a subset or the entirety of a specified sequence; for example, as a segment of a full-length cDNA or gene sequence, or the complete cDNA or gene sequence.

[0062] (b) As used herein, “comparison window” makes reference to a contiguous and specified segment of a polynucleotide sequence, wherein the polynucleotide sequence in the comparison window may comprise additions or deletions (i.e., gaps) compared to the reference sequence (which does not comprise additions or deletions) for optimal alignment of the two polynucleotides. Generally, the comparison window is at least 20 contiguous nucleotides in length, and optionally can be 30, 40, 50, 100, or longer. Those of skill in the art understand that to avoid a high similarity to a reference sequence due to inclusion of gaps in the polynucleotide sequence a gap penalty is typically introduced and is subtracted from the number of matches.

[0063] Unless otherwise stated, sequence identity/similarity values provided herein refer to the value obtained using GAP Version 10 using the following parameters: % identity and % similarity for a nucleotide sequence using GAP Weight of 50 and Length Weight of 3, and the nwsgapdna.cmp scoring matrix; % identity and % similarity for an amino acid sequence using GAP Weight of 8 and Length Weight of 2, and the BLOSUM62 scoring matrix; or any equivalent program thereof. By “equivalent program” is intended any sequence comparison program that, for any two sequences in question, generates an alignment having identical nucleotide or amino acid residue matches and an identical percent sequence identity when compared to the corresponding alignment generated by GAP Version 10.

[0064] (c) As used herein, “sequence identity” or “identity” in the context of two polynucleotides or polypeptide sequences makes reference to the residues in the two sequences that are the same when aligned for maximum correspondence over a specified comparison window. When percentage of sequence identity is used in reference to proteins it is recognized that residue positions which are not identical often differ by conservative amino acid substitutions, where amino acid residues are substituted for other amino acid residues with similar chemical properties (e.g., charge or hydrophobicity) and therefore do not change the functional properties of the molecule. When sequences differ in conservative substitutions, the percent sequence identity may be adjusted upwards to correct for the conservative nature of the substitution. Sequences that differ by such conservative substitutions are said to have “sequence similarity” or “similarity”. Means for making this adjustment are well known to those of skill in the art. Typically this involves scoring a conservative substitution as a partial rather than a full mismatch, thereby increasing the percentage sequence identity. Thus, for example, where an identical amino acid is given a score of 1 and a non-conservative substitution is given a score of zero, a conservative substitution is given a score between zero and 1. The scoring of conservative substitutions is calculated, e.g., as implemented in the program PC/GENE (Intelligenetics, Mountain View, Calif.).

[0065] (d) As used herein, “percentage of sequence identity” means the value determined by comparing two optimally aligned sequences over a comparison window, wherein the portion of the polynucleotide sequence in the comparison window may comprise additions or deletions (i.e., gaps) as compared to the reference sequence (which does not comprise additions or deletions) for optimal alignment of the two sequences. The percentage is calculated by determining the number of positions at which the identical nucleic acid base or amino acid residue occurs in both sequences to yield the number of matched positions, dividing the number of matched positions by the total number of positions in the window of comparison, and multiplying the result by 100 to yield the percentage of sequence identity.

[0066] A method is further provided for identifying a silencing element from the target polynucleotides set forth in SEQ ID NOS: 1, 4, 5, 8, 9, 12, 13, 16, 17, 20, 21, 24, 25, 28, 29, 32, 33, 36, 37, 40, 41, 44, 45, 48, 49, 52, 53, 54, 55, 56, 57, 60, 61, 64, 65, 68, 69, 72, 73, 76, 77, 80, 81, 84, 85, 88, 89, 92, 93, 96, 97, 100, 101, 104, 105, 108, 109, 112, 113, 116, 117, 120, 121, 124, 125, 128, 129, 132, 133, 136, 137, 140, 141, 144, 145, 148, 149, 152, 153, 156, 157, 160, 161, 164, 165, 168, 169, 172, 173, 176, 177, 180, 181, 184, 185, 188, 189, 192, 193, 196, 197, 200, 201, 204, 205, 208, 209, 212, 213, 216, 217, 220, 221, 224, 225, 228, 229, 232, 233, 236, 237, 240, 241, 244, 245, 248, 249, 252, 253, 256, 257, 260, 261, 264, 265, 268, 269, 272, 273, 276, 277, 280, 281, 284, 285, 288, 289, 292, 293, 296, 297, 300, 301, 304, 305, 308, 309, 312, 313, 316, 317, 320, 321, 324, 325, 328, 329, 332, 333, 336, 337, 340, 341, 344, 345, 348, 349, 352, 353, 356, 357, 360, 361, 364, 365, 368, 369, 372, 373, 376, 377, 380, 381, 384, 385, 388, 389, 392, 393, 396, 397, 400, 401, 404, 405, 408, 409, 412, 413, 416, 417, 420, 421, 424, 425, 428, 429, 432, 433, 436, 437, 440, 441, 444, 445, 448, 449, 452, 453, 456, 457, 460, 461, 464, 465, 468, 469, 472, 473, 476, 477, 480, 481, 484, 485, 488, 489, 492, 493, 496, 497, 500, 501, 504, 505, 508, 509, 512, 513, 516, 517, 520, 521, 524, 525, 528, 529, 532, 533, 536, 537, 540, 541, 544, 545, 548, 549, 552, 553, 556, 557, 560, 561, 562, 563, 564, 565, 566, 567, 568, 569, 570, 571, 572, 573, 574, 575, 576, 577, 578, 579, 580, 581, 582, 583, 584, 585, 586, 587, 588, 589, 590, 591, 592, 593, 594, 595, 596, 597, 598, 599, 600, 601, 602, 603, 604, 605, 606, 607, 608, 609, 610, 611, 612, 613, 614, 615, 616, 617, 618, 619, 620, 621, 622, 623, 624, 625, 626, 627, 628, 629, 630, 631, 632, 633, 634, 635, 636, 637, 638, 639, 640, 641, 642, 643, 644, 645, 646, 647, 648, 649, 650, 651, 652, 653, 654, 655, 656, 657, 658, 659, 660, 661, 662, 663, 664, 665, 666, 667, 668, 669, 670, 671, 672, 673, 674, 675, 676, 677, 678, 679, 680, 681, 682, 683, 684, 685, 686, 687, 688, 689, 690, 691, 692, 693, 694, 695, 696, 697, 700, 701, 702, 703, 706, 707, 708, 709, 712, 713, 714, 715, 718, 719, 720, 721, or active variants and fragments thereof, and complements thereof, including, for example, SEQ ID NOS: 1, 9, 37, 45, 49, 61, 65, 77, 101, 113, 137, 141, 145, 149, 153, 157, 169, 173, 181, 185, 189, 205, 217, 225, 233, 561, 562, 563, 564, 565, 566, 567, 568, 569, 570, 571, 572, 573, 574, 575, 576, 577, 578, 579, 580, 581, 582, 583, 584, 585, 586, 587, 588, 589, 590, 591, 592, 593, 594, 595, 596, 597, 598, 599, 600, 601, 602, 603, 604, 605, 606, 607, 608, 609, 610, 611, 612, 613, 614, 615, 616, 617, 618, 619, 620, 621, 622, 623, 624, 625, 626, 627, 628, 629, 630, 631, 632, 633, 634, 635, 636, 637, 638, 639, 640, 641, 642, 643, 644, 645, 646, 647, 648, 649, 650, 651, 652, 653, 654, 655, 656, 657, 658, 659, 660, 661, 662, 663, 664, 665, 666, 667, 668, 669, 670, 671, 672, 673, 674, 675, 676, 677, 678, 679, 680, 681, 682, 683, 684, 685, 686, 687, 688, 689, 690, 691, 692, and active variants and fragments thereof, and complements thereof, and SEQ ID NOS: 4, 140, 144, 148, 693, 694, 695, 696, 697, 700, 701, 702, 703, 706, 707, 708, 709, 712, 713, 714, 715, 718, 719, 720, 721 and active variants and fragments thereof, and complements thereof. Such methods comprise obtaining a candidate fragment of any one of SEQ ID NOS: 1, 4, 5, 8, 9, 12, 13, 16, 17, 20, 21, 24, 25, 28, 29, 32, 33, 36, 37, 40, 41, 44, 45, 48, 49, 52, 53, 54, 55, 56, 57, 60, 61, 64, 65, 68, 69, 72, 73, 76, 77, 80, 81, 84, 85, 88, 89, 92, 93, 96, 97, 100, 101, 104, 105, 108, 109, 112, 113, 116, 117, 120, 121, 124, 125, 128, 129, 132, 133, 136, 137, 140, 141, 144, 145, 148, 149, 152, 153, 156, 157, 160, 161, 164, 165, 168, 169, 172, 173, 176, 177, 180, 181, 184, 185, 188, 189, 192, 193, 196, 197, 200, 201, 204, 205, 208, 209, 212, 213, 216, 217, 220, 221, 224, 225, 228, 229, 232, 233, 236, 237, 240, 241, 244, 245, 248, 249, 252, 253, 256, 257, 260, 261, 264, 265, 268, 269, 272, 273, 276, 277, 280, 281, 284, 285, 288, 289, 292, 293, 296, 297, 300, 301, 304, 305, 308, 309, 312, 313, 316, 317, 320, 321, 324, 325, 328, 329, 332, 333, 336, 337, 340, 341, 344, 345, 348, 349, 352, 353, 356, 357, 360, 361, 364, 365, 368, 369, 372, 373, 376, 377, 380, 381, 384, 385, 388, 389, 392, 393, 396, 397, 400, 401, 404, 405, 408, 409, 412, 413, 416, 417, 420, 421, 424, 425, 428, 429, 432, 433, 436, 437, 440, 441, 444, 445, 448, 449, 452, 453, 456, 457, 460, 461, 464, 465, 468, 469, 472, 473, 476, 477, 480, 481, 484, 485, 488, 489, 492, 493, 496, 497, 500, 501, 504, 505, 508, 509, 512, 513, 516, 517, 520, 521, 524, 525, 528, 529, 532, 533, 536, 537, 540, 541, 544, 545, 548, 549, 552, 553, 556, 557, 560, 561, 562, 563, 564, 565, 566, 567, 568, 569, 570, 571, 572, 573, 574, 575, 576, 577, 578, 579, 580, 581, 582, 583, 584, 585, 586, 587, 588, 589, 590, 591, 592, 593, 594, 595, 596, 597, 598, 599, 600, 601, 602, 603, 604, 605, 606, 607, 608, 609, 610, 611, 612, 613, 614, 615, 616, 617, 618, 619, 620, 621, 622, 623, 624, 625, 626, 627, 628, 629, 630, 631, 632, 633, 634, 635, 636, 637, 638, 639, 640, 641, 642, 643, 644, 645, 646, 647, 648, 649, 650, 651, 652, 653, 654, 655, 656, 657, 658, 659, 660, 661, 662, 663, 664, 665, 666, 667, 668, 669, 670, 671, 672, 673, 674, 675, 676, 677, 678, 679, 680, 681, 682, 683, 684, 685, 686, 687, 688, 689, 690, 691, 692, 693, 694, 695, 696, 697, 700, 701, 702, 703, 706, 707, 708, 709, 712, 713, 714, 715, 718, 719, 720, 721, or active variants and fragments thereof, and complements thereof, including, for example, SEQ ID NOS: 1, 9, 37, 45, 49, 61, 65, 77, 101, 113, 137, 141, 145, 149, 153, 157, 169, 173, 181, 185, 189, 205, 217, 225, 233, 561, 562, 563, 564, 565, 566, 567, 568, 569, 570, 571, 572, 573, 574, 575, 576, 577, 578, 579, 580, 581, 582, 583, 584, 585, 586, 587, 588, 589, 590, 591, 592, 593, 594, 595, 596, 597, 598, 599, 600, 601, 602, 603, 604, 605, 606, 607, 608, 609, 610, 611, 612, 613, 614, 615, 616, 617, 618, 619, 620, 621, 622, 623, 624, 625, 626, 627, 628, 629, 630, 631, 632, 633, 634, 635, 636, 637, 638, 639, 640, 641, 642, 643, 644, 645, 646, 647, 648, 649, 650, 651, 652, 653, 654, 655, 656, 657, 658, 659, 660, 661, 662, 663, 664, 665, 666, 667, 668, 669, 670, 671, 672, 673, 674, 675, 676, 677, 678, 679, 680, 681, 682, 683, 684, 685, 686, 687, 688, 689, 690, 691, 692, and active variants and fragments thereof, and complements thereof, and SEQ ID NOS: 4, 140, 144, 148, 693, 694, 695, 696, 697, 700, 701, 702, 703, 706, 707, 708, 709, 712, 713, 714, 715, 718, 719, 720, 721 and active variants and fragments thereof, and complements thereof, which is of sufficient length to act as a silencing element and thereby reduce the expression of the target polynucleotide and/or control a desired pest; expressing said candidate polynucleotide fragment in an appropriate expression cassette to produce a candidate silencing element and determining is said candidate polynucleotide fragment has the activity of a silencing element and thereby reduce the expression of the target polynucleotide and/or controls a desired pest. Methods of identifying such candidate fragments based on the desired pathway for suppression are known. For example, various bioinformatics programs can be employed to identify the region of the target polynucleotides that could be exploited to generate a silencing element. See, for example, Elbahir et al. (2001) Genes and Development 15:188-200, Schwartz et al. (2003) Cell 115:199-208, Khvorova et al. (2003) Cell 115:209-216. See also, siRNA at Whitehead (jura.wi.mit.edu/bioc/siRNAext/) which calculates the binding energies for both sense and antisense siRNAs. See, also genscript.com/ssl-bin/app/rnai?op=known; Block-iT™ RNAi designer from Invitrogen and GenScript siRNA Construct Builder.

### V. DNA Constructs

[0067] The use of the term “polynucleotide” is not intended to limit the present invention to polynucleotides comprising DNA. Those of ordinary skill in the art will recognize that polynucleotides can comprise ribonucleotides and combinations of ribonucleotides and deoxyribonucleotides. Such deoxyribonucleotides and ribonucleotides include both naturally occurring molecules and synthetic analogues. The polynucleotides of the invention also encompass all forms of sequences including, but not limited to, single-stranded forms, double-stranded forms, hairpins, stem-and-loop structures, and the like.

[0068] The polynucleotide encoding the silencing element or in specific embodiments employed in the methods and compositions of the invention can be provided in expression cassettes for expression in a plant or organism of interest. It is recognized that multiple silencing elements including multiple identical silencing elements, multiple silencing elements targeting different regions of the target sequence, or multiple silencing elements from different target sequences can be used. In this embodiment, it is recognized that each silencing element can be contained in a single or separate cassette, DNA construct, or vector. As discussed, any means of providing the silencing element is contemplated. A plant or plant cell can be transformed with a single cassette comprising DNA encoding one or more silencing elements or separate cassettes comprising each silencing element can be used to transform a plant or plant cell or host cell. Likewise, a plant transformed with one component can be subsequently transformed with the second component. One or more silencing elements can also be brought together by sexual crossing. That is, a first plant comprising one component is crossed with a second plant comprising the second component. Progeny plants from the cross will comprise both components.

[0069] The expression cassette can include 5′ and 3′ regulatory sequences operably linked to the polynucleotide of the invention. “Operably linked” is intended to mean a functional linkage between two or more elements. For example, an operable linkage between a polynucleotide of the invention and a regulatory sequence (i.e., a promoter) is a functional link that allows for expression of the polynucleotide of the invention. Operably linked elements may be contiguous or non-contiguous. When used to refer to the joining of two protein coding regions, by operably linked is intended that the coding regions are in the same reading frame. The cassette may additionally contain at least one additional polynucleotide to be cotransformed into the organism. Alternatively, the additional polypeptide(s) can be provided on multiple expression cassettes. Expression cassettes can be provided with a plurality of restriction sites and/or recombination sites for insertion of the polynucleotide to be under the transcriptional regulation of the regulatory regions. The expression cassette may additionally contain selectable marker genes.

[0070] The expression cassette can include in the 5′-3′ direction of transcription, a transcriptional and translational initiation region (i.e., a promoter), a polynucleotide comprising the silencing element employed in the methods and compositions of the invention, and a transcriptional and translational termination region (i.e., termination region) functional in plants. In other embodiment, the double stranded RNA is expressed from a suppression cassette. Such a cassette can comprise two convergent promoters that drive transcription of an operably linked silencing element. “Convergent promoters” refers to promoters that are oriented on either terminus of the operably linked silencing element such that each promoter drives transcription of the silencing element in opposite directions, yielding two transcripts. In such embodiments, the convergent promoters allow for the transcription of the sense and anti-sense strand and thus allow for the formation of a dsRNA.

[0071] The regulatory regions (i.e., promoters, transcriptional regulatory regions, and translational termination regions) and/or the polynucleotides employed in the invention may be native/analogous to the host cell or to each other. Alternatively, the regulatory regions and/or the polynucleotide employed in the invention may be heterologous to the host cell or to each other. As used herein, “heterologous” in reference to a sequence is a sequence that originates from a foreign species, or, if from the same species, is substantially modified from its native form in composition and/or genomic locus by deliberate human intervention. For example, a promoter operably linked to a heterologous polynucleotide is from a species different from the species from which the polynucleotide was derived, or, if from the same/analogous species, one or both are substantially modified from their original form and/or genomic locus, or the promoter is not the native promoter for the operably linked polynucleotide. As used herein, a chimeric gene comprises a coding sequence operably linked to a transcription initiation region that is heterologous to the coding sequence.

[0072] The termination region may be native with the transcriptional initiation region, may be native with the operably linked polynucleotide encoding the silencing element, may be native with the plant host, or may be derived from another source (i.e., foreign or heterologous) to the promoter, the polynucleotide comprising silencing element, the plant host, or any combination thereof. Convenient termination regions are available from the Ti-plasmid of A. tumefaciens, such as the octopine synthase and nopaline synthase termination regions. See also Guerineau et al. (1991) Mol. Gen. Genet. 262:141-144; Proudfoot (1991) Cell 64:671-674; Sanfacon et al. (1991) Genes Dev. 5:141-149; Mogen et al. (1990) Plant Cell 2:1261-1272; Munroe et al. (1990) Gene 91:151-158; Ballas et al. (1989) Nucleic Acids Res. 17:7891-7903; and Joshi et al. (1987) Nucleic Acids Res. 15:9627-9639.

[0073] Additional sequence modifications are known to enhance gene expression in a cellular host. These include elimination of sequences encoding spurious polyadenylation signals, exon-intron splice site signals, transposon-like repeats, and other such well-characterized sequences that may be deleterious to gene expression. The G-C content of the sequence may be adjusted to levels average for a given cellular host, as calculated by reference to known genes expressed in the host cell. When possible, the sequence is modified to avoid predicted hairpin secondary mRNA structures.

[0074] In preparing the expression cassette, the various DNA fragments may be manipulated, so as to provide for the DNA sequences in the proper orientation and, as appropriate, in the proper reading frame. Toward this end, adapters or linkers may be employed to join the DNA fragments or other manipulations may be involved to provide for convenient restriction sites, removal of superfluous DNA, removal of restriction sites, or the like. For this purpose, in vitro mutagenesis, primer repair, restriction, annealing, resubstitutions, e.g., transitions and transversions, may be involved.

[0075] A number of promoters can be used in the practice of the invention. The polynucleotide encoding the silencing element can be combined with constitutive, tissue-preferred, or other promoters for expression in plants.

[0076] Such constitutive promoters include, for example, the core promoter of the Rsyn7 promoter and other constitutive promoters disclosed in WO 99/43838 and U.S. Pat. No. 6,072,050; the core CaMV 35S promoter (Odell et al. (1985) Nature 313:810-812); rice actin (McElroy et al. (1990) Plant Cell 2:163-171); ubiquitin (Christensen et al. (1989) Plant Mol. Biol. 12:619-632 and Christensen et al. (1992) Plant Mol. Biol. 18:675-689); pEMU (Last et al. (1991) Theor. Appl. Genet. 81:581-588); MAS (Velten et al. (1984) EMBO J. 3:2723-2730); ALS promoter (U.S. Pat. No. 5,659,026), and the like. Other constitutive promoters include, for example, U.S. Pat. Nos. 5,608,149; 5,608,144; 5,604,121; 5,569,597; 5,466,785; 5,399,680; 5,268,463; 5,608,142; and 6,177,611.

[0077] An inducible promoter, for instance, a pathogen-inducible promoter could also be employed. Such promoters include those from pathogenesis-related proteins (PR proteins), which are induced following infection by a pathogen; e.g., PR proteins, SAR proteins, beta-1,3-glucanase, chitinase, etc. See, for example, Redolfi et al. (1983) Neth. J. Plant Pathol. 89:245-254; Uknes et al. (1992) Plant Cell 4:645-656; and Van Loon (1985) Plant Mol. Virol. 4:111-116. See also WO 99/43819, herein incorporated by reference.

[0078] Additionally, as pathogens find entry into plants through wounds or insect damage, a wound-inducible promoter may be used in the constructions of the invention. Such wound-inducible promoters include potato proteinase inhibitor (pin II) gene (Ryan (1990) Ann. Rev. Phytopath. 28:425-449; Duan et al. (1996) Nature Biotechnology 14:494-498); wun1 and wun2, U.S. Pat. No. 5,428,148; win1 and win2 (Stanford et al. (1989) Mol. Gen. Genet. 215:200-208); systemin (McGurl et al. (1992) Science 225:1570-1573); WIP1 (Rohmeier et al. (1993) Plant Mol. Biol. 22:783-792; Eckelkamp et al. (1993) FEBS Letters 323:73-76); MPI gene (Corderok et al. (1994) Plant J. 6(2):141-150); and the like, herein incorporated by reference.

[0079] Chemical-regulated promoters can be used to modulate the expression of a gene in a plant through the application of an exogenous chemical regulator. Depending upon the objective, the promoter may be a chemical-inducible promoter, where application of the chemical induces gene expression, or a chemical-repressible promoter, where application of the chemical represses gene expression. Chemical-inducible promoters are known in the art and include, but are not limited to, the maize In2-2 promoter, which is activated by benzenesulfonamide herbicide safeners, the maize GST promoter, which is activated by hydrophobic electrophilic compounds that are used as pre-emergent herbicides, and the tobacco PR-la promoter, which is activated by salicylic acid. Other chemical-regulated promoters of interest include steroid-responsive promoters (see, for example, the glucocorticoid-inducible promoter in Schena et al. (1991) Proc. Natl. Acad. Sci. USA 88:10421-10425 and McNellis et al. (1998) Plant J. 14(2):247-257) and tetracycline-inducible and tetracycline-repressible promoters (see, for example, Gatz et al. (1991) Mol. Gen. Genet. 227:229-237, and U.S. Pat. Nos. 5,814,618 and 5,789,156), herein incorporated by reference.

[0080] Tissue-preferred promoters can be utilized to target enhanced expression within a particular plant tissue. Tissue-preferred promoters include Yamamoto et al. (1997) Plant J. 12(2):255-265; Kawamata et al. (1997) Plant Cell Physiol. 38(7):792-803; Hansen et al. (1997) Mol. Gen Genet. 254(3):337-343; Russell et al. (1997) Transgenic Res. 6(2):157-168; Rinehart et al. (1996) Plant Physiol. 112(3):1331-1341; Van Camp et al. (1996) Plant Physiol. 112(2):525-535; Canevascini et al. (1996) Plant Physiol. 112(2):513-524; Yamamoto et al. (1994) Plant Cell Physiol. 35(5):773-778; Lam (1994) Results Probl. Cell Differ. 20:181-196; Orozco et al. (1993) Plant Mol Biol. 23(6):1129-1138; Matsuoka et al. (1993) Proc Natl. Acad. Sci. USA 90(20):9586-9590; and Guevara-Garcia et al. (1993) Plant J. 4(3):495-505. Such promoters can be modified, if necessary, for weak expression.

[0081] Leaf-preferred promoters are known in the art. See, for example, Yamamoto et al. (1997) Plant J. 12(2):255-265; Kwon et al. (1994) Plant Physiol. 105:357-67; Yamamoto et al. (1994) Plant Cell Physiol. 35(5):773-778; Gotor et al. (1993) Plant J. 3:509-18; Orozco et al. (1993) Plant Mol. Biol. 23(6):1129-1138; and Matsuoka et al. (1993) Proc. Natl. Acad. Sci. USA 90(20):9586-9590.

[0082] Root-preferred promoters are known and can be selected from the many available from the literature or isolated de novo from various compatible species. See, for example, Hire et al. (1992) Plant Mol. Biol. 20(2):207-218 (soybean root-specific glutamine synthetase gene); Keller and Baumgartner (1991) Plant Cell 3(10):1051-1061 (root-specific control element in the GRP 1.8 gene of French bean); Sanger et al. (1990) Plant Mol. Biol. 14(3):433-443 (root-specific promoter of the mannopine synthase (MAS) gene of Agrobacterium tumefaciens); and Miao et al. (1991) Plant Cell 3(1):11-22 (full-length cDNA clone encoding cytosolic glutamine synthetase (GS), which is expressed in roots and root nodules of soybean). See also Bogusz et al. (1990) Plant Cell 2(7):633-641, where two root-specific promoters isolated from hemoglobin genes from the nitrogen-fixing nonlegume Parasponia andersonii and the related non-nitrogen-fixing nonlegume Trema tomentosa are described. The promoters of these genes were linked to a β-glucuronidase reporter gene and introduced into both the nonlegume Nicotiana tabacum and the legume Lotus corniculatus, and in both instances root-specific promoter activity was preserved. Leach and Aoyagi (1991) describe their analysis of the promoters of the highly expressed rolC and rolD root-inducing genes of Agrobacterium rhizogenes (see Plant Science (Limerick) 79(1):69-76). They concluded that enhancer and tissue-preferred DNA determinants are dissociated in those promoters. Teeri et al. (1989) used gene fusion to lacZ to show that the Agrobacterium T-DNA gene encoding octopine synthase is especially active in the epidermis of the root tip and that the TR2′ gene is root specific in the intact plant and stimulated by wounding in leaf tissue, an especially desirable combination of characteristics for use with an insecticidal or larvicidal gene (see EMBO J. 8(2):343-350). The TR1′ gene, fused to nptll (neomycin phosphotransferase II) showed similar characteristics. Additional root-preferred promoters include the VfENOD-GRP3 gene promoter (Kuster et al. (1995) Plant Mol. Biol. 29(4):759-772); and rolB promoter (Capana et al. (1994) Plant Mol. Biol. 25(4):681-691. See also U.S. Pat. Nos. 5,837,876; 5,750,386; 5,633,363; 5,459,252; 5,401,836; 5,110,732; and 5,023,179.

[0083] In one embodiment of this invention the plant-expressed promoter is a vascular-specific promoter such as a phloem-specific promoter. A “vascular-specific” promoter, as used herein, is a promoter which is at least expressed in vascular cells, or a promoter which is preferentially expressed in vascular cells. Expression of a vascular-specific promoter need not be exclusively in vascular cells, expression in other cell types or tissues is possible. A “phloem-specific promoter” as used herein, is a plant-expressible promoter which is at least expressed in phloem cells, or a promoter which is preferentially expressed in phloem cells.

[0084] Expression of a phloem-specific promoter need not be exclusively in phloem cells, expression in other cell types or tissues, e.g., xylem tissue, is possible. In one embodiment of this invention, a phloem-specific promoter is a plant-expressible promoter at least expressed in phloem cells, wherein the expression in non-phloem cells is more limited (or absent) compared to the expression in phloem cells. Examples of suitable vascular-specific or phloem-specific promoters in accordance with this invention include but are not limited to the promoters selected from the group consisting of: the SCSV3, SCSV4, SCSV5, and SCSV7 promoters (Schunmann et al. (2003) Plant Functional Biology 30:453-60; the rolC gene promoter of Agrobacterium rhizogenes(Kiyokawa et al. (1994) Plant Physiology 104:801-02; Pandolfini et al. (2003) BioMedCentral (BMC) Biotechnology 3:7, (www.biomedcentral.com/1472-6750/3/7); Graham et al. (1997) Plant Mol. Biol. 33:729-35; Guivarc′h et al. (1996); Almon et al. (1997) Plant Physiol. 115:1599-607; the rolA gene promoter of Agrobacterium rhizogenes (Dehio et al. (1993) Plant Mol. Biol. 23:1199-210); the promoter of the Agrobacterium tumefaciens T-DNA gene 5 (Korber et al. (1991) EMBO J. 10:3983-91); the rice sucrose synthase RSs1 gene promoter (Shi et al. (1994) J. Exp. Bot. 45:623-31); the CoYMV or Commelina yellow mottle badnavirus promoter (Medberry et al. (1992) Plant Cell 4:185-92; Zhou et al. (1998) Chin. J. Biotechnol. 14:9-16); the CFDV or coconut foliar decay virus promoter (Rohde et al. (1994) Plant Mol. Biol. 27:623-28; Hehn and Rhode (1998) J. Gen. Virol. 79:1495-99); the RTBV or rice tungro bacilliform virus promoter (Yin and Beachy (1995) Plant J. 7:969-80; Yin et al. (1997) Plant J. 12:1179-80); the pea glutamin synthase GS3A gene (Edwards et al. (1990) Proc. Natl. Acad. Sci. USA 87:3459-63; Brears et al. (1991) Plant J. 1:235-44); the inv CD111 and inv CD141 promoters of the potato invertase genes (Hedley et al. (2000) J. Exp. Botany 51:817-21); the promoter isolated from Arabidopsis shown to have phloem-specific expression in tobacco by Kertbundit et al. (1991) Proc. Natl. Acad. Sci. USA 88:5212-16); the VAHOX1 promoter region (Tornero et al. (1996) Plant J. 9:639-48); the pea cell wall invertase gene promoter (Zhang et al. (1996) Plant Physiol. 112:1111-17); the promoter of the endogenous cotton protein related to chitinase of US published patent application 20030106097, an acid invertase gene promoter from carrot (Ramloch-Lorenz et al. (1993) The Plant J. 4:545-54); the promoter of the sulfate transporter geneSultrl; 3 (Yoshimoto et al. (2003) Plant Physiol. 131:1511-17); a promoter of a sucrose synthase gene (Nolte and Koch (1993) Plant Physiol. 101:899-905); and the promoter of a tobacco sucrose transporter gene (Kuhn et al. (1997) Science 275-1298-1300).

[0085] Possible promoters also include the Black Cherry promoter for Prunasin Hydrolase (PH DL1.4 PRO) (U.S. Pat. No. 6,797,859), Thioredoxin H promoter from cucumber and rice (Fukuda A et al. (2005). Plant Cell Physiol. 46(11):1779-86), Rice (RSs1) (Shi, T. Wang et al. (1994). J. Exp. Bot. 45(274): 623-631) and maize sucrose synthese −1 promoters (Yang., N-S. et al. (1990) PNAS 87:4144-4148), PP2 promoter from pumpkin Guo, H. et al. (2004) Transgenic Research 13:559-566), At SUC2 promoter (Truernit, E. et al. (1995) Planta 196(3):564-70., At SAM-1 (S-adenosylmethionine synthetase) (Mijnsbrugge KV. et al. (1996) Planr. Cell. Physiol. 37(8): 1108-1115), and the Rice tungro bacilliform virus (RTBV) promoter (Bhattacharyya-Pakrasi et al. (1993) Plant J. 4(1):71-79).

[0086] The expression cassette can also comprise a selectable marker gene for the selection of transformed cells. Selectable marker genes are utilized for the selection of transformed cells or tissues. Marker genes include genes encoding antibiotic resistance, such as those encoding neomycin phosphotransferase II (NEO) and hygromycin phosphotransferase (HPT), as well as genes conferring resistance to herbicidal compounds, such as glufosinate ammonium, bromoxynil, imidazolinones, and 2,4-dichlorophenoxyacetate (2,4-D). Additional selectable markers include phenotypic markers such as β-galactosidase and fluorescent proteins such as green fluorescent protein (GFP) (Su et al. (2004) Biotechnol Bioeng 85:610-9 and Fetter et al. (2004) Plant Cell 16:215-28), cyan florescent protein (CYP) (Bolte et al. (2004) J. Cell Science 117:943-54 and Kato et al. (2002) Plant Physiol 129:913-42), and yellow florescent protein (PhiYFP™ from Evrogen, see, Bolte et al. (2004) J. Cell Science 117:943-54). For additional selectable markers, see generally, Yarranton (1992) Curr. Opin. Biotech. 3:506-511; Christopherson et al. (1992) Proc. Natl. Acad. Sci. USA 89:6314-6318; Yao et al. (1992) Cell 71:63-72; Reznikoff (1992) Mol. Microbiol. 6:2419-2422; Barkley et al. (1980) in The Operon, pp. 177-220; Hu et al. (1987) Cell 48:555-566; Brown et al. (1987) Cell 49:603-612; Figge et al. (1988) Cell 52:713-722; Deuschle et al. (1989) Proc. Natl. Acad. Sci. USA 86:5400-5404; Fuerst et al. (1989) Proc. Natl. Acad. Sci. USA 86:2549-2553; Deuschle et al. (1990) Science 248:480-483; Gossen (1993) Ph.D. Thesis, University of Heidelberg; Reines et al. (1993) Proc. Natl. Acad. Sci. USA 90:1917-1921; Labow et al. (1990) Mol. Cell. Biol. 10:3343-3356; Zambretti et al. (1992) Proc. Natl. Acad. Sci. USA 89:3952-3956; Baim et al. (1991) Proc. Natl. Acad. Sci. USA 88:5072-5076; Wyborski et al. (1991) Nucleic Acids Res. 19:4647-4653; Hillenand-Wissman (1989) Topics Mol. Struc. Biol. 10:143-162; Degenkolb et al. (1991) Antimicrob. Agents Chemother. 35:1591-1595; Kleinschnidt et al. (1988) Biochemistry 27:1094-1104; Bonin (1993) Ph.D. Thesis, University of Heidelberg; Gossen et al. (1992) Proc. Natl. Acad. Sci. USA 89:5547-5551; Oliva et al. (1992) Antimicrob. Agents Chemother. 36:913-919; Hlavka et al. (1985) Handbook of Experimental Pharmacology, Vol. 78 (Springer-Verlag, Berlin); Gill et al. (1988) Nature 334:721-724. Such disclosures are herein incorporated by reference. The above list of selectable marker genes is not meant to be limiting. Any selectable marker gene can be used in the present invention.

### VI. Compositions Comprising Silencing Elements

[0087] One or more of the polynucleotides comprising the silencing element can be provided as an external composition such as a spray or powder to the plant, plant part, seed, a pest, or an area of cultivation. In another example, a plant is transformed with a DNA construct or expression cassette for expression of at least one silencing element. In either composition, the silencing element, when ingested by an insect, can reduce the level of a target pest sequence and thereby control the pest (i.e., a Coleopteran plant pest including a Diabrotica plant pest, such as, D. virgifera virgifera, D. barberi, D. virgifera zeae, D. speciosa, or D. undecimpunctata howardi). It is recognized that the composition can comprise a cell (such as plant cell or a bacterial cell), in which a polynucleotide encoding the silencing element is stably incorporated into the genome and operably linked to promoters active in the cell. Compositions comprising a mixture of cells, some cells expressing at least one silencing element are also encompassed. In other embodiments, compositions comprising the silencing elements are not contained in a cell. In such embodiments, the composition can be applied to an area inhabited by a pest. In one embodiment, the composition is applied externally to a plant (i.e., by spraying a field or area of cultivation) to protect the plant from the pest. Methods of applying nucleotides in such a manner are known to those of skill in the art.

[0088] The composition of the invention can further be formulated as bait. In this embodiment, the compositions comprise a food substance or an attractant which enhances the attractiveness of the composition to the pest.

[0089] The composition comprising the silencing element can be formulated in an agriculturally suitable and/or environmentally acceptable carrier. Such carriers can be any material that the animal, plant or environment to be treated can tolerate. Furthermore, the carrier must be such that the composition remains effective at controlling a pest. Examples of such carriers include water, saline, Ringer's solution, dextrose or other sugar solutions, Hank's solution, and other aqueous physiologically balanced salt solutions, phosphate buffer, bicarbonate buffer and Tris buffer. In addition, the composition may include compounds that increase the half-life of a composition. Various insecticidal formulations can also be found in, for example, US Publications 2008/0275115, 2008/0242174, 2008/0027143, 2005/0042245, and 2004/0127520, each of which is herein incorporated by reference.

[0090] It is recognized that the polynucleotides comprising sequences encoding the silencing element can be used to transform organisms to provide for host organism production of these components, and subsequent application of the host organism to the environment of the target pest(s). Such host organisms include baculoviruses, bacteria, and the like. In this manner, the combination of polynucleotides encoding the silencing element may be introduced via a suitable vector into a microbial host, and said host applied to the environment, or to plants or animals.

[0091] The term “introduced” in the context of inserting a nucleic acid into a cell, means “transfection” or “transformation” or “transduction” and includes reference to the incorporation of a nucleic acid into a eukaryotic or prokaryotic cell where the nucleic acid may be stably incorporated into the genome of the cell (e.g., chromosome, plasmid, plastid, or mitochondrial DNA), converted into an autonomous replicon, or transiently expressed (e.g., transfected mRNA).

[0092] Microbial hosts that are known to occupy the “phytosphere” (phylloplane, phyllosphere, rhizosphere, and/or rhizoplana) of one or more crops of interest may be selected. These microorganisms are selected so as to be capable of successfully competing in the particular environment with the wild-type microorganisms, provide for stable maintenance and expression of the sequences encoding the silencing element, and desirably, provide for improved protection of the components from environmental degradation and inactivation.

[0093] Such microorganisms include bacteria, algae, and fungi. Of particular interest are microorganisms such as bacteria, e.g., Pseudomonas, Erwinia, Serratia, Klebsiella, Xanthomonas, Streptomyces, Rhizobium, Rhodopseudomonas, Methylius, Agrobacterium, Acetobacter, Lactobacillus, Arthrobacter, Azotobacter, Leuconostoc, and Alcaligenes, fungi, particularly yeast, e.g., Saccharomyces, Cryptococcus, Kluyveromyces, Sporobolomyces, Rhodotorula, and Aureobasidium. Of particular interest are such phytosphere bacterial species as Pseudomonas syringae, Pseudomonas fluorescens, Serratia marcescens, Acetobacter xylinum, Agrobacteria, Rhodopseudomonas spheroides, Xanthomonas campestris, Rhizobium melioti, Alcaligenes entrophus, Clavibacter xyli and Azotobacter vinlandir, and phytosphere yeast species such as Rhodotorula rubra, R. glutinis, R. marina, R. aurantiaca, Cryptococcus albidus, C. diffluens, C. laurentii, Saccharomyces rosei, S. pretoriensis, S. cerevisiae, Sporobolomyces rosues, S. odorus, Kluyveromyces veronae, and Aureobasidium pollulans. Of particular interest are the pigmented microorganisms.

[0094] A number of ways are available for introducing the polynucleotide comprising the silencing element into the microbial host under conditions that allow for stable maintenance and expression of such nucleotide encoding sequences. For example, expression cassettes can be constructed which include the nucleotide constructs of interest operably linked with the transcriptional and translational regulatory signals for expression of the nucleotide constructs, and a nucleotide sequence homologous with a sequence in the host organism, whereby integration will occur, and/or a replication system that is functional in the host, whereby integration or stable maintenance will occur.

[0095] Transcriptional and translational regulatory signals include, but are not limited to, promoters, transcriptional initiation start sites, operators, activators, enhancers, other regulatory elements, ribosomal binding sites, an initiation codon, termination signals, and the like. See, for example, U.S. Pat. Nos. 5,039,523 and 4,853,331; EPO 0480762A2; Sambrook et al. (2000); Molecular Cloning: A Laboratory Manual (3rd ed.; Cold Spring Harbor Laboratory Press, Plainview, N.Y.); Davis et al. (1980) Advanced Bacterial Genetics (Cold Spring Harbor Laboratory, Cold Spring Harbor, N.Y.); and the references cited therein.

[0096] Suitable host cells include the prokaryotes and the lower eukaryotes, such as fungi. Illustrative prokaryotes, both Gram-negative and Gram-positive, include Enterobacteriaceae, such as Escherichia, Erwinia, Shigella, Salmonella, and Proteus; Bacillaceae; Rhizobiceae, such as Rhizobium; Spirillaceae, such as photobacterium, Zymomonas, Serratia, Aeromonas, Vibrio, Desulfovibrio, Spirillum; Lactobacillaceae; Pseudomonadaceae, such as Pseudomonas and Acetobacter; Azotobacteraceae and Nitrobacteraceae. Among eukaryotes are fungi, such as Phycomycetes and Ascomycetes, which includes yeast, such as Saccharomyces and Schizosaccharomyces; and Basidiomycetes yeast, such as Rhodotorula, Aureobasidium, Sporobolomyces, and the like.

[0097] Characteristics of particular interest in selecting a host cell for purposes of the invention include ease of introducing the coding sequence into the host, availability of expression systems, efficiency of expression, stability in the host, and the presence of auxiliary genetic capabilities. Characteristics of interest for use as a pesticide microcapsule include protective qualities, such as thick cell walls, pigmentation, and intracellular packaging or formation of inclusion bodies; leaf affinity; lack of mammalian toxicity; attractiveness to pests for ingestion; and the like. Other considerations include ease of formulation and handling, economics, storage stability, and the like.

[0098] Host organisms of particular interest include yeast, such as Rhodotorula spp., Aureobasidium spp., Saccharomyces spp., and Sporobolomyces spp., phylloplane organisms such as Pseudomonas spp., Erwinia spp., and Flavobacterium spp., and other such organisms, including Pseudomonas aeruginosa, Pseudomonas fluorescens, Saccharomyces cerevisiae, Bacillus thuringiensis, Escherichia coli, Bacillus subtilis, and the like.

[0099] The sequences encoding the silencing elements encompassed by the invention can be introduced into microorganisms that multiply on plants (epiphytes) to deliver these components to potential target pests. Epiphytes, for example, can be gram-positive or gram-negative bacteria.

[0100] The silencing element can be fermented in a bacterial host and the resulting bacteria processed and used as a microbial spray in the same manner that Bacillus thuringiensis strains have been used as insecticidal sprays. Any suitable microorganism can be used for this purpose. By way of example, Pseudomonas has been used to express Bacillus thuringiensis endotoxins as encapsulated proteins and the resulting cells processed and sprayed as an insecticide Gaertner et al. (1993), in Advanced Engineered Pesticides, ed. L. Kim (Marcel Decker, Inc.).

[0101] Alternatively, the components of the invention are produced by introducing heterologous genes into a cellular host. Expression of the heterologous sequences results, directly or indirectly, in the intracellular production of the silencing element. These compositions may then be formulated in accordance with conventional techniques for application to the environment hosting a target pest, e.g., soil, water, and foliage of plants. See, for example, EPA 0192319, and the references cited therein.

[0102] In the present invention, a transformed microorganism can be formulated with an acceptable carrier into separate or combined compositions that are, for example, a suspension, a solution, an emulsion, a dusting powder, a dispersible granule, a wettable powder, and an emulsifiable concentrate, an aerosol, an impregnated granule, an adjuvant, a coatable paste, and also encapsulations in, for example, polymer substances.

[0103] Such compositions disclosed above may be obtained by the addition of a surface-active agent, an inert carrier, a preservative, a humectant, a feeding stimulant, an attractant, an encapsulating agent, a binder, an emulsifier, a dye, a UV protectant, a buffer, a flow agent or fertilizers, micronutrient donors, or other preparations that influence plant growth. One or more agrochemicals including, but not limited to, herbicides, insecticides, fungicides, bactericides, nematicides, molluscicides, acaracides, plant growth regulators, harvest aids, and fertilizers, can be combined with carriers, surfactants or adjuvants customarily employed in the art of formulation or other components to facilitate product handling and application for particular target pests. Suitable carriers and adjuvants can be solid or liquid and correspond to the substances ordinarily employed in formulation technology, e.g., natural or regenerated mineral substances, solvents, dispersants, wetting agents, tackifiers, binders, or fertilizers. The active ingredients of the present invention (i.e., at least one silencing element) are normally applied in the form of compositions and can be applied to the crop area, plant, or seed to be treated. For example, the compositions may be applied to grain in preparation for or during storage in a grain bin or silo, etc. The compositions may be applied simultaneously or in succession with other compounds. Methods of applying an active ingredient or a composition that contains at least one silencing element include, but are not limited to, foliar application, seed coating, and soil application. The number of applications and the rate of application depend on the intensity of infestation by the corresponding pest.

[0104] Suitable surface-active agents include, but are not limited to, anionic compounds such as a carboxylate of, for example, a metal; carboxylate of a long chain fatty acid; an N-acylsarcosinate; mono- or di-esters of phosphoric acid with fatty alcohol ethoxylates or salts of such esters; fatty alcohol sulfates such as sodium dodecyl sulfate, sodium octadecyl sulfate, or sodium cetyl sulfate; ethoxylated fatty alcohol sulfates; ethoxylated alkylphenol sulfates; lignin sulfonates; petroleum sulfonates; alkyl aryl sulfonates such as alkyl-benzene sulfonates or lower alkylnaphtalene sulfonates, e.g., butyl-naphthalene sulfonate; salts of sulfonated naphthalene-formaldehyde condensates; salts of sulfonated phenol-formaldehyde condensates; more complex sulfonates such as the amide sulfonates, e.g., the sulfonated condensation product of oleic acid and N-methyl taurine; or the dialkyl sulfosuccinates, e.g., the sodium sulfonate or dioctyl succinate. Non-ionic agents include condensation products of fatty acid esters, fatty alcohols, fatty acid amides or fatty-alkyl- or alkenyl-substituted phenols with ethylene oxide, fatty esters of polyhydric alcohol ethers, e.g., sorbitan fatty acid esters, condensation products of such esters with ethylene oxide, e.g., polyoxyethylene sorbitan fatty acid esters, block copolymers of ethylene oxide and propylene oxide, acetylenic glycols such as 2,4,7,9-tetraethyl-5-decyn-4,7-diol, or ethoxylated acetylenic glycols. Examples of a cationic surface-active agent include, for instance, an aliphatic mono-, di-, or polyamine such as an acetate, naphthenate or oleate; or oxygen-containing amine such as an amine oxide of polyoxyethylene alkylamine; an amide-linked amine prepared by the condensation of a carboxylic acid with a di- or polyamine; or a quaternary ammonium salt.

[0105] Examples of inert materials include, but are not limited to, inorganic minerals such as kaolin, phyllosilicates, carbonates, sulfates, phosphates, or botanical materials such as cork, powdered corncobs, peanut hulls, rice hulls, and walnut shells.

[0106] The compositions comprising the silencing element can be in a suitable form for direct application or as a concentrate of primary composition that requires dilution with a suitable quantity of water or other dilutant before application.

[0107] The compositions (including the transformed microorganisms) can be applied to the environment of an insect pest (such as a Coleoptera plant pest or a Diabrotica plant pest) by, for example, spraying, atomizing, dusting, scattering, coating or pouring, introducing into or on the soil, introducing into irrigation water, by seed treatment or general application or dusting at the time when the pest has begun to appear or before the appearance of pests as a protective measure. For example, the composition(s) and/or transformed microorganism(s) may be mixed with grain to protect the grain during storage. It is generally important to obtain good control of pests in the early stages of plant growth, as this is the time when the plant can be most severely damaged. The compositions can conveniently contain another insecticide if this is thought necessary. In an embodiment of the invention, the composition(s) is applied directly to the soil, at a time of planting, in granular form of a composition of a carrier and dead cells of a Bacillus strain or transformed microorganism of the invention. Another embodiment is a granular form of a composition comprising an agrochemical such as, for example, a herbicide, an insecticide, a fertilizer, in an inert carrier, and dead cells of a Bacillus strain or transformed microorganism of the invention.

VII. Plants, Plant Parts, and Methods of Introducing Sequences into Plants

[0108] In one embodiment, the methods of the invention involve introducing a polynucleotide into a plant. “Introducing” is intended to mean presenting to the plant the polynucleotide in such a manner that the sequence gains access to the interior of a cell of the plant. The methods of the invention do not depend on a particular method for introducing a sequence into a plant, only that the polynucleotide or polypeptides gains access to the interior of at least one cell of the plant. Methods for introducing polynucleotides into plants are known in the art including, but not limited to, stable transformation methods, transient transformation methods, and virus-mediated methods.

[0109] “Stable transformation” is intended to mean that the nucleotide construct introduced into a plant integrates into the genome of the plant and is capable of being inherited by the progeny thereof. “Transient transformation” is intended to mean that a polynucleotide is introduced into the plant and does not integrate into the genome of the plant or a polypeptide is introduced into a plant.

[0110] Transformation protocols as well as protocols for introducing polypeptides or polynucleotide sequences into plants may vary depending on the type of plant or plant cell, i.e., monocot or dicot, targeted for transformation. Suitable methods of introducing polypeptides and polynucleotides into plant cells include microinjection (Crossway et al. (1986) Biotechniques 4:320-334), electroporation (Riggs et al. (1986) Proc. Natl. Acad. Sci. USA 83:5602-5606, Agrobacterium-mediated transformation (U.S. Pat. No. 5,563,055 and U.S. Pat. No. 5,981,840), direct gene transfer (Paszkowski et al. (1984) EMBO J. 3:2717-2722), and ballistic particle acceleration (see, for example, U.S. Pat. No. 4,945,050; U.S. Pat. No. 5,879,918; U.S. Pat. Nos. 5,886,244; and, 5,932,782; Tomes et al. (1995) in Plant Cell, Tissue, and Organ Culture: Fundamental Methods, ed. Gamborg and Phillips (Springer-Verlag, Berlin); McCabe et al. (1988) Biotechnology 6:923-926); and Led 1 transformation (WO 00/28058). Also see Weissinger et al. (1988) Ann. Rev. Genet. 22:421-477; Sanford et al. (1987) Particulate Science and Technology 5:27-37 (onion); Christou et al. (1988) Plant Physiol. 87:671-674 (soybean); McCabe et al. (1988) Bio/Technology 6:923-926 (soybean); Finer and McMullen (1991) In Vitro Cell Dev. Biol. 27P:175-182 (soybean); Singh et al. (1998) Theor. Appl. Genet. 96:319-324 (soybean); Datta et al. (1990) Biotechnology 8:736-740 (rice); Klein et al. (1988) Proc. Natl. Acad. Sci. USA 85:4305-4309 (maize); Klein et al. (1988) Biotechnology 6:559-563 (maize); U.S. Pat. Nos. 5,240,855; 5,322,783; and, 5,324,646; Klein et al. (1988) Plant Physiol. 91:440-444 (maize); Fromm et al. (1990) Biotechnology 8:833-839 (maize); Hooykaas-Van Slogteren et al. (1984) Nature (London) 311:763-764; U.S. Pat. No. 5,736,369 (cereals); Bytebier et al. (1987) Proc. Natl. Acad. Sci. USA 84:5345-5349 (Liliaceae); De Wet et al. (1985) in The Experimental Manipulation of Ovule Tissues, ed. Chapman et al. (Longman, New York), pp. 197-209 (pollen); Kaeppler et al. (1990) Plant Cell Reports 9:415-418 and Kaeppler et al. (1992) Theor. Appl. Genet. 84:560-566 (whisker-mediated transformation); D'Halluin et al. (1992) Plant Cell 4:1495-1505 (electroporation); Li et al. (1993) Plant Cell Reports 12:250-255 and Christou and Ford (1995) Annals of Botany 75:407-413 (rice); Osjoda et al. (1996) Nature Biotechnology 14:745-750 (maize via Agrobacterium tumefaciens); all of which are herein incorporated by reference.

[0111] In specific embodiments, the silencing element sequences of the invention can be provided to a plant using a variety of transient transformation methods. Such transient transformation methods include, but are not limited to, the introduction of the protein or variants and fragments thereof directly into the plant or the introduction of the transcript into the plant. Such methods include, for example, microinjection or particle bombardment. See, for example, Crossway et al. (1986) Mol Gen. Genet. 202:179-185; Nomura et al. (1986) Plant Sci. 44:53-58; Hepler et al. (1994) Proc. Natl. Acad. Sci. 91: 2176-2180 and Hush et al. (1994) The Journal of Cell Science 107:775-784, all of which are herein incorporated by reference. Alternatively, polynucleotides can be transiently transformed into the plant using techniques known in the art. Such techniques include viral vector systems and the precipitation of the polynucleotide in a manner that precludes subsequent release of the DNA. Thus, the transcription from the particle-bound DNA can occur, but the frequency with which it is released to become integrated into the genome is greatly reduced. Such methods include the use of particles coated with polyethylimine (PEI; Sigma #P3143).

[0112] In other embodiments, the polynucleotide of the invention may be introduced into plants by contacting plants with a virus or viral nucleic acids. Generally, such methods involve incorporating a nucleotide construct of the invention within a viral DNA or RNA molecule. Further, it is recognized that promoters of the invention also encompass promoters utilized for transcription by viral RNA polymerases. Methods for introducing polynucleotides into plants and expressing a protein encoded therein, involving viral DNA or RNA molecules, are known in the art. See, for example, U.S. Pat. Nos. 5,889,191, 5,889,190, 5,866,785, 5,589,367, 5,316,931, and Porta et al. (1996) Molecular Biotechnology 5:209-221; herein incorporated by reference.

[0113] Methods are known in the art for the targeted insertion of a polynucleotide at a specific location in the plant genome. In one embodiment, the insertion of the polynucleotide at a desired genomic location is achieved using a site-specific recombination system. See, for example, WO99/25821, WO99/25854, WO99/25840, WO99/25855, and WO99/25853, all of which are herein incorporated by reference. Briefly, the polynucleotide of the invention can be contained in transfer cassette flanked by two non-recombinogenic recombination sites. The transfer cassette is introduced into a plant having stably incorporated into its genome a target site which is flanked by two non-recombinogenic recombination sites that correspond to the sites of the transfer cassette. An appropriate recombinase is provided and the transfer cassette is integrated at the target site. The polynucleotide of interest is thereby integrated at a specific chromosomal position in the plant genome.

[0114] The cells that have been transformed may be grown into plants in accordance with conventional ways. See, for example, McCormick et al. (1986) Plant Cell Reports 5:81-84. These plants may then be grown, and either pollinated with the same transformed strain or different strains, and the resulting progeny having constitutive expression of the desired phenotypic characteristic identified. Two or more generations may be grown to ensure that expression of the desired phenotypic characteristic is stably maintained and inherited and then seeds harvested to ensure expression of the desired phenotypic characteristic has been achieved. In this manner, the present invention provides transformed seed (also referred to as “transgenic seed”) having a polynucleotide of the invention, for example, an expression cassette of the invention, stably incorporated into their genome.

[0115] As used herein, the term plant includes plant cells, plant protoplasts, plant cell tissue cultures from which plants can be regenerated, plant calli, plant clumps, and plant cells that are intact in plants or parts of plants such as embryos, pollen, ovules, seeds, leaves, flowers, branches, fruit, kernels, ears, cobs, husks, stalks, roots, root tips, anthers, and the like. Grain is intended to mean the mature seed produced by commercial growers for purposes other than growing or reproducing the species. Progeny, variants, and mutants of the regenerated plants are also included within the scope of the invention, provided that these parts comprise the introduced polynucleotides.

[0116] The present invention may be used for transformation of any plant species, including, but not limited to, monocots and dicots. Examples of plant species of interest include, but are not limited to, corn (Zea mays), Brassica sp. (e.g., B. napus, B. rapa, B. juncea), particularly those Brassica species useful as sources of seed oil, alfalfa (Medicago sativa), rice (Oryza sativa), rye (Secale cereale), sorghum (Sorghum bicolor, Sorghum vulgare), millet (e.g., pearl millet (Pennisetum glaucum), proso millet (Panicum miliaceum), foxtail millet (Setaria italica), finger millet (Eleusine coracana)), sunflower (Helianthus annuus), safflower (Carthamus tinctorius), wheat (Triticum aestivum), soybean (Glycine max), tobacco (Nicotiana tabacum), potato (Solanum tuberosum), peanuts (Arachis hypogaea), cotton (Gossypium barbadense, Gossypium hirsutum), sweet potato (Ipomoea batatus), cassava (Manihot esculenta), coffee (Coffea spp.), coconut (Cocos nucifera), pineapple (Ananas comosus), citrus trees (Citrus spp.), cocoa (Theobroma cacao), tea (Camellia sinensis), banana (Musa spp.), avocado (Persea americana), fig (Ficus casica), guava (Psidium guajava), mango (Mangifera indica), olive (Olea europaea), papaya (Carica papaya), cashew (Anacardium occidentale), macadamia (Macadamia integrifolia), almond (Prunus amygdalus), sugar beets (Beta vulgaris), sugarcane (Saccharum spp.), oats, barley, vegetables, ornamentals, and conifers.

[0117] Vegetables include tomatoes (Lycopersicon esculentum), lettuce (e.g., Lactuca sativa), green beans (Phaseolus vulgaris), lima beans (Phaseolus limensis), peas (Lathyrus spp.), and members of the genus Cucumis such as cucumber (C. sativus), cantaloupe (C. cantalupensis), and musk melon (C. melo). Ornamentals include azalea (Rhododendron spp.), hydrangea (Macrophylla hydrangea), hibiscus (Hibiscus rosasanensis), roses (Rosa spp.), tulips (Tulipa spp.), daffodils (Narcissus spp.), petunias (Petunia hybrida), carnation (Dianthus caryophyllus), poinsettia (Euphorbia pulcherrima), and chrysanthemum.

[0118] Conifers that may be employed in practicing the present invention include, for example, pines such as loblolly pine (Pinus taeda), slash pine (Pinus elliotii), ponderosa pine (Pinus ponderosa), lodgepole pine (Pinus contorta), and Monterey pine (Pinus radiata); Douglas-fir (Pseudotsuga menziesii); Western hemlock (Tsuga canadensis); Sitka spruce (Picea glauca); redwood (Sequoia sempervirens); true firs such as silver fir (Abies amabilis) and balsam fir (Abies balsamea); and cedars such as Western red cedar (Thuja plicata) and Alaska yellow-cedar (Chamaecyparis nootkatensis). In specific embodiments, plants of the present invention are crop plants (for example, corn, alfalfa, sunflower, Brassica, soybean, cotton, safflower, peanut, sorghum, wheat, millet, tobacco, etc.). In other embodiments, corn and soybean plants and sugarcane plants are optimal, and in yet other embodiments corn plants are optimal.

[0119] Other plants of interest include grain plants that provide seeds of interest, oil-seed plants, and leguminous plants. Seeds of interest include grain seeds, such as corn, wheat, barley, rice, sorghum, rye, etc. Oil-seed plants include cotton, soybean, safflower, sunflower, Brassica, maize, alfalfa, palm, coconut, etc. Leguminous plants include beans and peas. Beans include guar, locust bean, fenugreek, soybean, garden beans, cowpea, mungbean, lima bean, fava bean, lentils, chickpea, etc.

### VIII. Methods of Use

[0120] Methods of the invention comprise methods for controlling a pest (i.e., a Coleopteran plant pest, including a Diabrotica plant pest, such as, D. virgifera virgifera, D. barberi, D. virgifera zeae, D. speciosa, or D. undecimpunctata howardi). The method comprises feeding or applying to a pest a composition comprising a silencing element of the invention, wherein said silencing element, when ingested or contacted by a pest (i.e., a Coleopteran plant pest including a Diabrotica plant pest, such as, D. virgifera virgifera, D. barberi, D. virgifera zeae, D. speciosa, or D. undecimpunctata howardi), reduces the level of a target polynucleotide of the pest and thereby controls the pest. The pest can be fed the silencing element in a variety of ways. For example, in one embodiment, the polynucleotide comprising the silencing element is introduced into a plant. As the Coleopteran plant pest or Diabrotica plant pest feeds on the plant or part thereof expressing these sequences, the silencing element is delivered to the pest. When the silencing element is delivered to the plant in this manner, it is recognized that the silencing element can be expressed constitutively or alternatively, it may be produced in a stage-specific manner by employing the various inducible or tissue-preferred or developmentally regulated promoters that are discussed elsewhere herein. In specific embodiments, the silencing element is expressed in the roots, stalk or stem, leaf including pedicel, xylem and phloem, fruit or reproductive tissue, silk, flowers and all parts therein or any combination thereof.

[0121] In another method, a composition comprising at least one silencing element of the invention is applied to a plant. In such embodiments, the silencing element can be formulated in an agronomically suitable and/or environmentally acceptable carrier, which is preferably, suitable for dispersal in fields. In addition, the carrier can also include compounds that increase the half life of the composition. In specific embodiments, the composition comprising the silencing element is formulated in such a manner such that it persists in the environment for a length of time sufficient to allow it to be delivered to a pest. In such embodiments, the composition can be applied to an area inhabited by a pest. In one embodiment, the composition is applied externally to a plant (i.e., by spraying a field) to protect the plant from pests.

[0122] In certain embodiments, the constructs of the present invention can be stacked with any combination of polynucleotide sequences of interest in order to create plants with a desired trait. A trait, as used herein, refers to the phenotype derived from a particular sequence or groups of sequences. For example, the polynucleotides of the present invention may be stacked with any other polynucleotides encoding polypeptides having pesticidal and/or insecticidal activity, such as other Bacillus thuringiensis toxic proteins (described in U.S. Pat. Nos. 5,366,892; 5,747,450; 5,737,514; 5,723,756; 5,593,881; and Geiser et al. (1986) Gene 48:109), lectins (Van Damme et al. (1994) Plant Mol. Biol. 24:825, pentin (described in U.S. Pat. No. 5,981,722), and the like. The combinations generated can also include multiple copies of any one of the polynucleotides of interest. The polynucleotides of the present invention can also be stacked with any other gene or combination of genes to produce plants with a variety of desired trait combinations including, but not limited to, traits desirable for animal feed such as high oil genes (e.g., U.S. Pat. No. 6,232,529); balanced amino acids (e.g., hordothionins (U.S. Pat. Nos. 5,990,389; 5,885,801; 5,885,802; and 5,703,409); barley high lysine (Williamson et al. (1987) Eur. J. Biochem. 165:99-106; and WO 98/20122) and high methionine proteins (Pedersen et al. (1986) J. Biol. Chem. 261:6279; Kirihara et al. (1988) Gene 71:359; and Musumura et al. (1989) Plant Mol. Biol. 12:123)); increased digestibility (e.g., modified storage proteins (U.S. application Ser. No. 10/053,410, filed Nov. 7, 2001); and thioredoxins (U.S. application Ser. No. 10/005,429, filed Dec. 3, 2001)); the disclosures of which are herein incorporated by reference.

[0123] The polynucleotides of the present invention can also be stacked with traits desirable for disease or herbicide resistance (e.g., fumonisin detoxification genes (U.S. Pat. No. 5,792,931); avirulence and disease resistance genes (Jones et al. (1994) Science 266:789; Martin et al. (1993) Science 262:1432; Mindrinos et al. (1994) Cell 78:1089); acetolactate synthase (ALS) mutants that lead to herbicide resistance such as the S4 and/or Hra mutations; inhibitors of glutamine synthase such as phosphinothricin or basta (e.g., bar gene); and glyphosate resistance (EPSPS gene)); and traits desirable for processing or process products such as high oil (e.g., U.S. Pat. No. 6,232,529); modified oils (e.g., fatty acid desaturase genes (U.S. Pat. No. 5,952,544; WO 94/11516)); modified starches (e.g., ADPG pyrophosphorylases (AGPase), starch synthases (SS), starch branching enzymes (SBE), and starch debranching enzymes (SDBE)); and polymers or bioplastics (e.g., U.S. Pat. No. 5,602,321; beta-ketothiolase, polyhydroxybutyrate synthase, and acetoacetyl-CoA reductase (Schubert et al. (1988) J. Bacteriol. 170:5837-5847) facilitate expression of polyhydroxyalkanoates (PHAs)); the disclosures of which are herein incorporated by reference. One could also combine the polynucleotides of the present invention with polynucleotides providing agronomic traits such as male sterility (e.g., see U.S. Pat. No. 5,583,210), stalk strength, drought resistance (e.g., U.S. Pat. No. 7,786,353), flowering time, or transformation technology traits such as cell cycle regulation or gene targeting (e.g., WO 99/61619, WO 00/17364, and WO 99/25821); the disclosures of which are herein incorporated by reference.

[0124] These stacked combinations can be created by any method including, but not limited to, cross-breeding plants by any conventional or TopCross methodology, or genetic transformation. If the sequences are stacked by genetically transforming the plants (i.e., molecular stacks), the polynucleotide sequences of interest can be combined at any time and in any order. For example, a transgenic plant comprising one or more desired traits can be used as the target to introduce further traits by subsequent transformation. The traits can be introduced simultaneously in a co-transformation protocol with the polynucleotides of interest provided by any combination of transformation cassettes. For example, if two sequences will be introduced, the two sequences can be contained in separate transformation cassettes (trans) or contained on the same transformation cassette (cis). Expression of the sequences can be driven by the same promoter or by different promoters. In certain cases, it may be desirable to introduce a transformation cassette that will suppress the expression of the polynucleotide of interest. This may be combined with any combination of other suppression cassettes or overexpression cassettes to generate the desired combination of traits in the plant. It is further recognized that polynucleotide sequences can be stacked at a desired genomic location using a site-specific recombination system. See, for example, WO99/25821, WO99/25854, WO99/25840, WO99/25855, and WO99/25853, all of which are herein incorporated by reference.

[0125] The following examples are offered by way of illustration and not by way of limitation.

### EXPERIMENTAL

### Example 1: In Vitro Transcript dsRNA Screening Method

[0126] A cDNA library was produced from neonate western corn rootworm larvae by standard methods. A selected cDNA clone containing an expressed sequence tag was amplified in a PCR using universal primers to the plasmid backbone and flanking the EST insert. The universal primers also contained T7 RNA polymerase sites. Product of the PCR reaction was used as the template for an in vitro transcription (IVT) reaction to produce long double stranded RNAs. Following enzymatic digestion and removal of the DNA template and single stranded RNA, the IVT reaction products were incorporated into artificial insect diet as described below.

[0127] Different target selection strategies were used in this invention to identify RNAi active targets with insecticidal activities in corn rootworn diet based assay. cDNA libraries were produced from neonate or midgut of 3rd instar western corn rootworm larvae by standard methods. Randomly selected cDNA clones containing an expressed sequence tag (EST) were amplified in a PCR using target specific primers (forward and reverse Table 1), and provided in the sequence listing included herein, to generate DNA templates. The target specific primers also contain T7 RNA polymerase sites (T7 sequence at 5′ end of each primer). Second set of cDNA clones was selected based on homology to known lethal genes from other insects, primarily Drosophila melanogaster. A third set of genes was tested based on involvement in proteosome functions. Identification of these genes was based on a progressive homology search beginning with a list of proteosome genes identified in humans cross referenced to the Tribolium genome database. Hits from Tribolium were then used to parse western corn rootworm sequence database. Proteosome genes were categorized as 26S subunit non ATPase, 26S subunit ATPase, alpha type, and beta type genes.

[0128] Region(s) of WCRW genes were produced by PCR followed by in vitro transcription (IVT) to produce long double stranded RNAs. The IVT reaction products are quantified in gel and incorporated into artificial insect diet for first-round IVT screening (FIS) as described below.

### Insect Bioassays

[0129] dsRNAs were incorporated into standard WCRW artificial diet at a final concentration of 50 ppm in a 96 well microtiter plate format. 5 μl of the IVT reaction (300 ng/ul) were added to a given well of a 96 well microtiter plate. 25 μl of molten lowmelt Western corn rootworm diet were added to the sample and shaken on an orbital shaker to mix the sample and diet. Once the diet has solidified, eight wells were used for each RNA sample. Preconditioned 1^{st} instar WCRW (neonate insects were placed on neutral diet for 24 hours prior to transfer to test material) were added to the 96 well microtiter plates at a rate of 3-5 insects/well. Plates were sealed with mylar which was then punctured twice above each well of the microtiter plate using a superfine insect collection pin. To prevent drying of the diet, plates were first placed inside a plastic bag with a slightly damp cloth and the bags were placed inside an incubator set at 28 C and 70RH. The assay was scored for mortality and stunting affects after 7 days and an average was determined based on assignment of numeric values to each category of impact (3=mortality, 2=severe stunting, 1=stunting, 0=no affect). The number reported in this and all diet assay tables reflect the average score across all observations. A score of 3 represents complete mortality across all observations. A score of 2.5 would indicate half the wells demonstrating mortality and half scored as severe stunting. The assay results can be found in Table 1A.

[0130] DNA sequences which encode double stranded RNAs which were shown to have insecticidal activity (average score above 1.5) against corn rootworms using the assay described in Example 1 are listed in Table 1. To identify full length of cDNA or full open-reading frame of RNAi active target gene, full insert sequencing for EST clones and transcriptome analyses of midgut RNA samples were conducted. Sequences of all target transcripts containing full length cDNA or longer transcripts were also listed in Table 1. Some of these sequences were used for RNAi active fragment search.

### Example 2. Sequences Having Insecticidal Activity

[0131] DNA sequences which encode double stranded RNAs which were shown to have insecticidal activity against corn rootworms using the assay described in Example 1 are set forth below. Non-limiting examples of target polynucleotides are set forth below in Table 1A and B, and SEQ ID NOS: 1, 4, 5, 8, 9, 12, 13, 16, 17, 20, 21, 24, 25, 28, 29, 32, 33, 36, 37, 40, 41, 44, 45, 48, 49, 52, 53, 54, 55, 56, 57, 60, 61, 64, 65, 68, 69, 72, 73, 76, 77, 80, 81, 84, 85, 88, 89, 92, 93, 96, 97, 100, 101, 104, 105, 108, 109, 112, 113, 116, 117, 120, 121, 124, 125, 128, 129, 132, 133, 136, 137, 140, 141, 144, 145, 148, 149, 152, 153, 156, 157, 160, 161, 164, 165, 168, 169, 172, 173, 176, 177, 180, 181, 184, 185, 188, 189, 192, 193, 196, 197, 200, 201, 204, 205, 208, 209, 212, 213, 216, 217, 220, 221, 224, 225, 228, 229, 232, 233, 236, 237, 240, 241, 244, 245, 248, 249, 252, 253, 256, 257, 260, 261, 264, 265, 268, 269, 272, 273, 276, 277, 280, 281, 284, 285, 288, 289, 292, 293, 296, 297, 300, 301, 304, 305, 308, 309, 312, 313, 316, 317, 320, 321, 324, 325, 328, 329, 332, 333, 336, 337, 340, 341, 344, 345, 348, 349, 352, 353, 356, 357, 360, 361, 364, 365, 368, 369, 372, 373, 376, 377, 380, 381, 384, 385, 388, 389, 392, 393, 396, 397, 400, 401, 404, 405, 408, 409, 412, 413, 416, 417, 420, 421, 424, 425, 428, 429, 432, 433, 436, 437, 440, 441, 444, 445, 448, 449, 452, 453, 456, 457, 460, 461, 464, 465, 468, 469, 472, 473, 476, 477, 480, 481, 484, 485, 488, 489, 492, 493, 496, 497, 500, 501, 504, 505, 508, 509, 512, 513, 516, 517, 520, 521, 524, 525, 528, 529, 532, 533, 536, 537, 540, 541, 544, 545, 548, 549, 552, 553, 556, 557, 560, 561, 562, 563, 564, 565, 566, 567, 568, 569, 570, 571, 572, 573, 574, 575, 576, 577, 578, 579, 580, 581, 582, 583, 584, 585, 586, 587, 588, 589, 590, 591, 592, 593, 594, 595, 596, 597, 598, 599, 600, 601, 602, 603, 604, 605, 606, 607, 608, 609, 610, 611, 612, 613, 614, 615, 616, 617, 618, 619, 620, 621, 622, 623, 624, 625, 626, 627, 628, 629, 630, 631, 632, 633, 634, 635, 636, 637, 638, 639, 640, 641, 642, 643, 644, 645, 646, 647, 648, 649, 650, 651, 652, 653, 654, 655, 656, 657, 658, 659, 660, 661, 662, 663, 664, 665, 666, 667, 668, 669, 670, 671, 672, 673, 674, 675, 676, 677, 678, 679, 680, 681, 682, 683, 684, 685, 686, 687, 688, 689, 690, 691, 692, 693, 694, 695, 696, 697, 700, 701, 702, 703, 706, 707, 708, 709, 712, 713, 714, 715, 718, 719, 720, 721, or active variants and fragments thereof, and complements thereof, including, for example, SEQ ID NOS: 1, 9, 37, 45, 49, 61, 65, 77, 101, 113, 137, 141, 145, 149, 153, 157, 169, 173, 181, 185, 189, 205, 217, 225, 233, 561, 562, 563, 564, 565, 566, 567, 568, 569, 570, 571, 572, 573, 574, 575, 576, 577, 578, 579, 580, 581, 582, 583, 584, 585, 586, 587, 588, 589, 590, 591, 592, 593, 594, 595, 596, 597, 598, 599, 600, 601, 602, 603, 604, 605, 606, 607, 608, 609, 610, 611, 612, 613, 614, 615, 616, 617, 618, 619, 620, 621, 622, 623, 624, 625, 626, 627, 628, 629, 630, 631, 632, 633, 634, 635, 636, 637, 638, 639, 640, 641, 642, 643, 644, 645, 646, 647, 648, 649, 650, 651, 652, 653, 654, 655, 656, 657, 658, 659, 660, 661, 662, 663, 664, 665, 666, 667, 668, 669, 670, 671, 672, 673, 674, 675, 676, 677, 678, 679, 680, 681, 682, 683, 684, 685, 686, 687, 688, 689, 690, 691, 692, and active variants and fragments thereof, and complements thereof, and SEQ ID NOS: 4, 140, 144, 148, 693, 694, 695, 696, 697, 700, 701, 702, 703, 706, 707, 708, 709, 712, 713, 714, 715, 718, 719, 720, 721 and active variants and fragments thereof, and complements thereof.

[0132] Subregions of efficacious dsRNAs were designed to improve insecticidal activities in diet and dsRNA expression in planta. These fragments were assayed in the same manner as the original FIS assays described above. Regions demonstrating a severe impact on larval phenotype (mortality or severe growth retardation) were advanced to informal inhibitory concentration (IC50) assays. IC50 assays used doses starting at 50 ppm and progressing downward by ½ step dilutions through 25, 12.5, 6, 3, 1.5, and 0.75 pppm. 12 observations were included for each rate. Assay methods were the same as described above for primary screens. Calculations of inhibition relied on scoring for both mortality and severe stunting

Selected fragments were advanced to formal dose response assays where both LC50 and IC50 values were calculated and described in Table 2 (Seq No. 561 to 692). These assays included an initial range finding assay followed by dose response assays for selected ranges including 3 replications of the experiment. Fragments with confirmed IC50 values below 2 ppm were advanced to plant transformation vector construction.

[0133] The proteosome alpha subunit type 3 (PAT3) target gene was used as a model for gene and construct optimization. As a first step, the gene was divided into ⅓, ⅙, and 1/12 size fragments (f). In addition, f11-13 represent spanning segments over the boundaries of the first four ⅙th fragments. FIG. 5 provides a diagram of the fragments of PAT3.

[0134] Plant preferred fragments were identified from active RNAi gene targets and tested in dsRNA artificial diet assays. Selection of these plant preferred regions was based on avoiding destabilizing elements and motifs, or regions with unsuitable base composition. Homology assessments were also employed to avoid potential non target organisms. Finally, fragments with a size range of 150-250 bp were preferred. All rules were considered in selecting fragments but fragments were not excluded from consideration based on any one rule. The table 2 includes data for initial FIS samples and subsequent fragments insecticidal assay. Selected samples were advanced to IC50 and LC50 determinations.

### Example 3. Identify RNAi Active Targets from Other Insects

[0135] To identify RNAi active genes from other important corn pests or no-target insects, transcriptome experiments were completed using 3^{rd} instar larvae from Northern corn rootworm (Diabrotica barberi), Southern corn rootworm (Diabrotica undecimpunctata), Mexican Bean Beetle (Epilachna varivestis), Colorado potato beetle (Leptinotarsa decemlineata), Insidious flower bug (Orius insidiosus) and Spotted Lady Beetle (Coleomegilla maculata, [CMAC]). Homologous transcripts of RNAi active leads were listed in Table 3 (Seq No.693 to 723). This sequence data is important for designing fragments to suppress target pest genes and avoid knockdown same gene in no target insects.

### Example 4. Insecticidal RNA Targets in WCRW Midgut

[0136] Two RNAi active targets Ryanr and HP2 (Table 1 and Table 2) were identified through random cDNA FIS screening. Ryanr was identified in a previous FIS screening (US 2011/0054007A1). Fragments of these targets showed very strong insecticidal activities. Homologous searches reveal that Ryanr and HP2 showed 54% and 49% identity to Drosophila Ssk and Mesh, respectively. The Mesh-Ssk protein complex is required for septate junction formation in the Drosophila midgut. See the amino acid sequence alignment of WCRW Ryanr and Drosophila Ssk in FIG. 4.

### Example 5. Transformation of Maize

[0137] Immature maize embryos from greenhouse donor plants are bombarded with a plasmid containing the silencing element of the invention operably linked to either a tissue specific, tissue selective, or constitutive promoter and the selectable marker gene PAT (Wohlleben et al. (1988) Gene 70:25-37), which confers resistance to the herbicide Bialaphos. In one embodiment, the constructs will express a long double stranded RNA of the target sequence set forth in table 1. Such a construct can be linked to the dMMB promoter. Alternatively, the selectable marker gene is provided on a separate plasmid. Transformation is performed as follows. Media recipes follow below.

### Preparation of Target Tissue

[0138] The ears are husked and surface sterilized in 30% Clorox bleach plus 0.5% Micro detergent for 20 minutes, and rinsed two times with sterile water. The immature embryos are excised and placed embryo axis side down (scutellum side up), 25 embryos per plate, on 560Y medium for 4 hours and then aligned within the 2.5 cm target zone in preparation for bombardment.

[0139] A plasmid vector comprising the silencing element of interest operably linked to either the tissue specific, tissue selective, or constitutive promoter is made. This plasmid DNA plus plasmid DNA containing a PAT selectable marker is precipitated onto 1.1 μm (average diameter) tungsten pellets using a CaCl₂ precipitation procedure as follows: 100 μl prepared tungsten particles in water; 10 μl (1 μg) DNA in Tris EDTA buffer (1 μg total DNA); 100 μl 2.5 M CaCl₂; and, 10 μl 0.1 M spermidine.

[0140] Each reagent is added sequentially to the tungsten particle suspension, while maintained on the multitube vortexer. The final mixture is sonicated briefly and allowed to incubate under constant vortexing for 10 minutes. After the precipitation period, the tubes are centrifuged briefly, liquid removed, washed with 500 ml 100% ethanol, and centrifuged for 30 seconds. Again the liquid is removed, and 105 μl 100% ethanol is added to the final tungsten particle pellet. For particle gun bombardment, the tungsten/DNA particles are briefly sonicated and 10 μl spotted onto the center of each macrocarrier and allowed to dry about 2 minutes before bombardment.

[0141] The sample plates are bombarded at level #4 in a particle gun. All samples receive a single shot at 650 PSI, with a total of ten aliquots taken from each tube of prepared particles/DNA.

[0142] Following bombardment, the embryos are kept on 560Y medium for 2 days, then transferred to 560R selection medium containing 3 mg/liter Bialaphos, and subcultured every 2 weeks. After approximately 10 weeks of selection, selection-resistant callus clones are transferred to 288J medium to initiate plant regeneration. Following somatic embryo maturation (2-4 weeks), well-developed somatic embryos are transferred to medium for germination and transferred to the lighted culture room. Approximately 7-10 days later, developing plantlets are transferred to 272V hormone-free medium in tubes for 7-10 days until plantlets are well established. Plants are then transferred to inserts in flats (equivalent to 2.5″ pot) containing potting soil and grown for 1 week in a growth chamber, subsequently grown an additional 1-2 weeks in the greenhouse, then transferred to classic 600 pots (1.6 gallon) and grown to maturity.

[0143] Plants are monitored and scored for the appropriate marker, such as the control of a Coleoptera plant pest, such as a Diabrotica plant pest and have insecticidal activity. For example, Ro plant roots are fed to western corn rootworm larvae (WCR, Diabrotica virgifera). Transgenic corn roots are handed-off in Petri dishes with MSOD medium containing antibiotics and glyphosate for in vitro selection. Two WCR larvae are infested per root in each dish with a fine tip paintbrush. The dishes are sealed with Parafilm to prevent the larvae from escaping. The assays are placed into a 27° C., 60% RH Percival incubator incomplete darkness. Contamination and larval quality are monitored. After six days of feeding on root tissue, the larvae are transferred to WCR diet in a 96 well plate. The larvae are allowed to feed on the diet for eight days making the full assay fourteen days long. Larval mass and survivorship are recorded for analysis. A one-way ANOVA analysis and a Dunnett's test is performed on the larval mass data to look for statistical significance compared to an untransformed negative control. WCR larvae stunting is measured after feeding on two events and compared to growth of larvae fed on negative control plants.

[0144] in other assays, transgenic corn plants (Ro) generated are planted into 10-inch pots containing Metromix soil after reaching an appropriate size. When plants reach the V4 growth stage, approximately 1000 Western corn rootworm (WCR, Diabrotica virgifera) eggs are infested into the root zone. Non-transgenic corn of the same genotype is infested at a similar growth stage to serve as a negative control. Eggs are pre-incubated so hatch occurs within 24 hours of infestation. Larvae are allowed to feed on the root systems for 3 weeks. Plants are removed from the soil and washed so that the roots can be evaluated for larval feeding. Root damage is rated using a Node Injury Scale (NIS) to score the level of damage where a 0 indicates no damage, a 1 indicates that one node of roots is pruned to within 1.5 inches. a 2 indicates that 2 nodes are pruned, while a 3 indicates that 3 nodes are pruned. Because the plants being used for evaluation are directly out of tissue culture after transformation and because transformation events are unique, only a single plant is evaluated per event at this time. The plants in the assay that present signs or symptoms of larval feeding indicate that a successful infestation is obtained. Negative control plant roots are moderately to severely damaged averaging whereas roots of the transgenic plants provide substantial control of larval feeding, with about 0.2 or less on the Node Injury Scale.

[0145] Bombardment medium (560Y) comprises 4.0 g/l N6 basal salts (SIGMA C-1416), 1.0 ml/l Eriksson's Vitamin Mix (1000× SIGMA-1511), 0.5 mg/l thiamine HCl, 120.0 g/l sucrose, 1.0 mg/l 2,4-D, and 2.88 g/l L-proline (brought to volume with D-I H₂O following adjustment to pH 5.8 with KOH); 2.0 g/l Gelrite (added after bringing to volume with D-I H₂O); and 8.5 mg/l silver nitrate (added after sterilizing the medium and cooling to room temperature). Selection medium (560R) comprises 4.0 g/l N6 basal salts (SIGMA C-1416), 1.0 ml/1 Eriksson's Vitamin Mix (1000× SIGMA-1511), 0.5 mg/l thiamine HCl, 30.0 g/l sucrose, and 2.0 mg/l 2,4-D (brought to volume with D-I H₂O following adjustment to pH 5.8 with KOH); 3.0 g/l Gelrite (added after bringing to volume with D-I H₂O); and 0.85 mg/l silver nitrate and 3.0 mg/l bialaphos (both added after sterilizing the medium and cooling to room temperature).

[0146] Plant regeneration medium (288J) comprises 4.3 g/l MS salts (GIBCO 11117-074), 5.0 ml/1 MS vitamins stock solution (0.100 g nicotinic acid, 0.02 g/l thiamine HCl, 0.10 g/l pyridoxine HCl, and 0.40 g/l glycine brought to volume with polished D-I H₂O) (Murashige and Skoog (1962) Physiol. Plant. 15:473), 100 mg/l myo-inositol, 0.5 mg/l zeatin, 60 g/l sucrose, and 1.0 ml/1 of 0.1 mM abscisic acid (brought to volume with polished D-I H₂O after adjusting to pH 5.6); 3.0 g/l Gelrite (added after bringing to volume with D-I H₂O); and 1.0 mg/l indoleacetic acid and 3.0 mg/l bialaphos (added after sterilizing the medium and cooling to 60° C.). Hormone-free medium (272V) comprises 4.3 g/l MS salts (GIBCO 11117-074), 5.0 ml/1 MS vitamins stock solution (0.100 g/l nicotinic acid, 0.02 g/l thiamine HCl, 0.10 g/l pyridoxine HCl, and 0.40 g/l glycine brought to volume with polished D-I H₂O), 0.1 g/l myo-inositol, and 40.0 g/l sucrose (brought to volume with polished D-I H₂O after adjusting pH to 5.6); and 6 g/l bacto-agar (added after bringing to volume with polished D-I H₂O), sterilized and cooled to 60° C.

### Example 6. Agrobacterium-Mediated Transformation of Maize

[0147] For Agrobacterium-mediated transformation of maize with a silencing element of the invention, the method of Zhao is employed (U.S. Pat. No. 5,981,840, and PCT patent publication WO98/32326; the contents of which are hereby incorporated by reference). Such a construct can, for example, express a long double stranded RNA of the target sequence set forth in table 1. Such a construct can be linked to the dMMB promoter. Briefly, immature embryos are isolated from maize and the embryos contacted with a suspension of Agrobacterium, where the bacteria are capable of transferring the polynucleotide comprising the silencing element to at least one cell of at least one of the immature embryos (step 1: the infection step). In this step the immature embryos are immersed in an Agrobacterium suspension for the initiation of inoculation. The embryos are co-cultured for a time with the Agrobacterium (step 2: the co-cultivation step). The immature embryos are cultured on solid medium following the infection step. Following this co-cultivation period an optional “resting” step is contemplated. In this resting step, the embryos are incubated in the presence of at least one antibiotic known to inhibit the growth of Agrobacterium without the addition of a selective agent for plant transformants (step 3: resting step). The immature embryos are cultured on solid medium with antibiotic, but without a selecting agent, for elimination of Agrobacterium and for a resting phase for the infected cells. Next, inoculated embryos are cultured on medium containing a selective agent and growing transformed callus is recovered (step 4: the selection step). The immature embryos are cultured on solid medium with a selective agent resulting in the selective growth of transformed cells. The callus is then regenerated into plants (step 5: the regeneration step), and calli grown on selective medium are cultured on solid medium to regenerate the plants. Assays for insecticidal activity can be performed as described above in Example, 5.

### Example 7 Expression of Silencing Elements in Maize

[0148] The silencing elements are expressed in a maize plant as hairpins and the plant is tested for insecticidal activity against corn root worms.

[0149] Maize plants are transformed with Plasmids containing at least one polynucleotide disclosed herein and plants expressing the silencing elements are transplanted from 272V plates into greenhouse flats containing Fafard Superfine potting mix. Approximately 10 to 14 days after transplant, plants (now at growth stage V2-V3) are transplanted into treepots containing Fafard Superfine potting mix. At 14 days post greenhouse send date, plants are infested with 100 eggs of western corn root worms (WCRW)/plant. For later sets, a second infestation of 100 eggs WCRW/plant is done 14 days after the first infestation and scoring is at 14 days after the second infestation. 21 days post infestation, plants are scored using CRWNIS. Those plants with a score of <0.5 are transplanted into large pots containing SB300 for seed.

[0150] The sequences referred to herein, SEQ. ID NOs: 1-723 are filed concurrently herewith in a textfile and are incorporated herein in their entirities.

[0151] As used herein the singular forms “a”, “and”, and “the” include plural referents unless the context clearly dictates otherwise. Thus, for example, reference to “a cell” includes a plurality of such cells and reference to “the protein” includes reference to one or more proteins and equivalents thereof known to those skilled in the art, and so forth. All technical and scientific terms used herein have the same meaning as commonly understood to one of ordinary skill in the art to which this invention belongs unless clearly indicated otherwise.

[0152] All publications and patent applications mentioned in the specification are indicative of the level of those skilled in the art to which this invention pertains. All publications and patent applications are herein incorporated by reference to the same extent as if each individual publication or patent application was specifically and individually indicated to be incorporated by reference.

[0153] Although the foregoing invention has been described in some detail by way of illustration and example for purposes of clarity of understanding, certain changes and modifications may be practiced within the scope of the appended claims.

The application's sequence listing, which the Patent Office published only in electronic form, follows.

SEQUENCE LISTING (725 sequences)

SEQ ID NO: 1 - DNA, 593 bp, Diabrotica virgifera
  misc_feature (1)..(593): RNAi target sequence
  misc_feature (480)..(480): n can be any nucleotide
  misc_feature (495)..(495): n can be any nucleotide
tgacttcacacttccagatggttctagagcagcaatagtgaataacataaatgacatggaaagggtttacaatgattttggttccaaatggatgttggaggatgtgttagatcctcaaaagggtagagcattgttccacagggaattcggaaggacttcagcgacttacaacaacaaaacgttcaagcctcaattcctaatgaatccggaagatttcctaccaaccaacagatctacagatcttaagcgaatatccgaaatatgtcctctaaagttgtacgaatgttactacgattacgctatgacggttgacagggatttggcgcattacaccaagaattataaagccacgatctatcaatataaagaaacgacaaggaggaaagttgtgtcttgcggagtactagaaacaccgagattcggacgaaagagtactttcctgttcgtgcccggtacgaaggttacctatgaatgcatccnagagttcgtgttggntaggtgatcagcggagagagtgtcaagcggatggaacatggaatattcctgaatacggatacacatattgcttacgtcagcaggaatactctcaacga

SEQ ID NO: 2 - DNA, 22 bp, Artificial Sequence
  primer
  misc_feature (1)..(22): forward primer
tgacttcacacttccagatggt

SEQ ID NO: 3 - DNA, 22 bp, Artificial Sequence
  primer
  misc_feature (1)..(22): reverse primer
tcgttgagagtattcctgctga

SEQ ID NO: 4 - DNA, 5689 bp, Diabrotica virgifera
  misc_feature (1)..(5689): WCRW transcript ta0120.010_diavv
tgttcatcaccaacgctgaccaacgtgagagtagcaactttttttgatgtgatgtgcgccagtttgtagtgccaaataaccaaaatgtggttcaagtactttgttatttttgttttgtttagtgttagcgttaaaggactagatggtgatcttccaccagatgtcgaaactatcgatgtggagactacgaatgtaagtaacgcggatccagacgcagggaaacctattccggtggaagatacgcctaatggagtccctccagtgaatacaaactatgaagtagataaatccttagttaatgtaaccaatagtttggtaaatgtgactaaaaatcccagacggacttatcagacagttaataaaatgggcaaatattcgacattttatgctgcagattacgatcctatgacctcagacacagctccaccagacactgaccaacgaggaggaggaggaactccatacactatatcagaaccgagactggcagaaataaggaaacattttatgtacccatttttcgataaaggaggcagtgataataacttgggagatttccaaaaggacattcaatcttccattcctcaggtgcacaagaatttaaacttccagttgcctttctttggattcaggtataattacacaagagtttcagtgaatgggtatctggaattcagcgatccacctccaaattatgactatccattagtatttccaattaaagaatggcccaaaaagaatgatcctgcctttattggcattttcttcagcagatgcagaatcggtaatctacgtgatggagacattgatcaaagaacacccggggtctattttagaatggaaagagatttaagaacgaggcaagacagaatgggtgtagaaattagagaaagacttaagtgggatatcagaacaggagtcattggatcagaaacattcgatcctaagcacgccgttattgtcacttggaaaaatgttactttcactggaggattcgctaatgctaaatacaagacaaacaccttccaaatggttcttgcaactgacgaagtcttcacttacgcgatgttcaactacctcaacttggactggacctcccacactgaagcgggtggtgattcccaaaacggggaaggtggtgtcagtgcctatgttggttttaacgctggaaacggtaccagaagctacgaatacaatccttacagtcaagcttccgtcattcgagatctcacatcagttggatttggaaatggttttaagggaagacatattttccgtatagacgaagacattttgcttggatcgtgcaacaaagatatagatggtgccaaccttcccctgaaattcgctcctgaaagtggtaacatgttgggtggaacagtggtaaatataactggtccatgcttcaatttgaatgataggattcgatgcaagtttgacgtatcaaatgaagtatttgggtatgttgttgataaaaacagagctatctgtgtacaacctcaactttatgccgaaggatgggtgaatcttcaaattgctgttaattccgaagcattcaagtggaaggggaagtattatgtagaatcacctgctagtgcgactcaaaaaatcttctttaaggacatgaaattacacgaaaaatctccgagcgaattaaaaatcacttgggagaagcagaatttgaccacaaacgacaacgctaacatccgaatttctctctggggttacagagaaacgactatgaaaccagtgtttgtttatatcaccgatatcgctgataatgttcaaaacattggagaacacacgattgttccttctcagtttagaactagagtcaatcaatatctgactgatattaagtttggattcctccaaattaatttaactgagtctatcacagttaatacatatactacaagccagagcagcatagaattaacaccggtaatatggagccgacccattccactcggttggtacttccagttccaatgggaaaaccagtacggtaaaaattggcccaaatatctatgtgacgattggctgagaacggacagatatctaaaaaacttcgcccacgaacttgctcaatgtccctgcaccgtcgaacaggctttagctgacaagggcaggtttatgccagacttcgattgcgacaaagattcgaacccgatttgttactataacaaccaagcacttcattgtgtgaaaactggatctcccactttagaaggctccgaacaacaatgttgctatgataaaaacggctttttgatgctctcttacgatcagcaatggggttctagtccgagacgttgccacaacttgggtaaaatgccttacaatgaagcgacaaaagtgcctactctctcacaatggtttaatgacatggtacccaaatatttgtgttgtctttggcaagacgagcaagctgtgggatgtgaaacactgagatttgaacggagacctacacaggattgtgtagcttaccaagcaccaggtgtagcaggagtctacggtgatccacactttgttactttcgacgatgtagaatatacgtttaatggaaagggagaattcgcattggtgaaatcagttacgcaaacggacaatctggaaatccaaggaagatttgagcaaatggaccctaacacttatggtgaggttagagctactcagctgacttctgtagtagctaaaggtaataacacaatagcaattgaagtcagaaggagacctctggattctagatggagatataggttggatgttatagcagataatagaagactttattttgatagaccctcactaaaattccagcacttccaaggtgttactatttacactccaagctacatccttaatcaatcagaagtcatcattatgtttgacaatggagctggaatggaggttgtcgacaatcaaggattcatgagtgcaagagtatttttgccttggtcgtttataaataaaaccataggcctttttggaaattggagttttaacaaagaagatgacttcacacttccagatggttctagagcagcaatagtgaataacataaatgacatggaaagggtttacaatgattttggttccaaatggatgttggaggatgtgttagatcctcaaaagggtagagcattgttccacagggaattcggaagaacttcagcgacttacaacaacaaaacgttcaagcctcaattcctaatgaatccggaagatttcctaccaaccaacagatctacagatcttaagcgaatatccgaaatatgtcctctaaagttgtacgaatgttactacgattacgctatgacggttgacagggatttggcgcattacaccaagaattataaagccacgatctatcaatataaagaaacgacaaggaggaaagttgtgtcttgcggagtactagaaacaccgagattcggacgaaagagtactttcctgttcgtgcccggtacgaaggttacctatgaatgcatccaagagttcgtgttggtaggtgatcagcggagagagtgtcaagcggatggaacatggaatattcctgaatacggatacacatattgcttacgtcagcaggaatactctcaacgacaagctggtttggcttccgggataattatggctattcttatcccgctcatcttgcttttcgtctacctggcgtatcgtttcttacaaagaaggcagaaagaaaaagaatctgaaaaattacaagagcaacagttcatggaatcacaaaggagagcccaagaagcagctactaagaaattaacagaagctgaatatgcttcagaagatgaagacagtaatgttacaagcacgggagcaaaagaaacaaccgtatactaacacctatagaatataatgattcaacctatgaattgtaatattttaaagtttaatctttgtcaaaactattatataaaataagtactatattatgttgtagttaatatttaataggacttttattttttattgtatttcagattatatttcatgcagagtgtgatttagattatatttcatgcaaagtgtagagtttcagatatagcctttttaaccacaacgtaatccgattcttatagtaaattcaacattatttaagatactttttcattgaattgtatacctatctaatcctgcaagacccacatatctttttcccaattaaaagagtaaataggaagatacgaaagcacaaagttaaaataaattaacgaatttcataaaacccagtagaaagctatgttctgcagttattatctaaattagaatactattaagtaaccatatcacccttctcaagtttacattaacatcaagatctactggtggcatccataggtaggtgcctactcgtatatttagtaaacaacagtttgttgatccatcaacttcttgttggtaagattcagctcaacgttgagggcaaccggcccttcttcttaaagttccatcttctatcagaggttggatatcataatgggtttggtcactatgttggctgctgctctgaatagttgtaataaactacagttaaaccattatctaaggttctttagccaggagatgcgtcttcttccttggatccttccttgcataataattctcagcaactcatatttttctcctctggtaatgtgacccaaatattccagttttctatgtttttatactgttcataatttctaactccttatttaaacgtcgtagcacttcaacattggtaatcctttgaacccactgaattttcaatattcttctgtaacaccacatttcgaacgcttctatttttcttatgtgttgtctcttcaacgtccaagcttccattccgtatagtaatatagaaaatatgtagcatcttagagccctcaatctgagaggcaactgaaggtctttgtttgtaagcagtgtcttcatttataaatgcttgccttgcagtttcaattcggactttaatttctttgctttggtcatttttgtcatcaacccaggttcccagatatttatatgtctaactttttctatttgggtttgctctctatcattaacctttcatttccatgttgtgtttttgagacaatcataaatttagtttttttcttgtttatttttagtccgtatcgaatgcaataatcgttaattctatttagcaattcttgtagcgatcccagggtgtctgccattataaggatgtcatcagcgaatcttgtgttatttactatttttccgtttatagagattctatcacttagctccgctatcgcttcctgaaatatggcttcactgtacacgttaaacagtagcggcgacagaacacaaccctgtcttactcctctctttatatcaatattctcggattcttgttcttctatctttatattggccttttgattccaatacagattgatgataattcgcaaatctcgtaaaaaagcagctctcatttaatttaacgaagaaccatgtgtaggaaacccatcagcagaatgtagcaggctctggttgccaataataaagaagtcagcaacaagaatataccaacattaacggattagtagaaagttggggtcacttcttcttttggcatgataagcctagatgggtctttgcctgtctggctatgttccattcagatctctcttgtgctcttctccattgtctgttc

SEQ ID NO: 5 - DNA, 446 bp, Diabrotica virgifera
  misc_feature (1)..(446): RNAi target sequence
aagagtagcgatgggtggtttacctcaaggaggaatattaagccctttgttatatttaatttacacttctgatatagaaaaaaatttaaactcaacaaaaattttacaatttgcagatgatgtagttatttatcaagaaaacattaaaatagaaaatgcagtcaaatccattgaagaaggagacaaacatattaaaatatggagtgaattacatggactaaatatatctgattccaaaaccaaattatgtatttttacaagaaaacgaaaagaaatacccaatcacatcttaataaacaatatatcctatcctgtacaaagttatgttaaatatttgggtattactctggatagacagcttctctggaaagaacatatagacaatatagttaaaaaaacagaaaaaggaataaaccttcttcgattcgtatcacacttacgttggg

SEQ ID NO: 6 - DNA, 22 bp, Artificial Sequence
  primer
  misc_feature (1)..(22): forward primer
aagagtagcgatgggtggttta

SEQ ID NO: 7 - DNA, 22 bp, Artificial Sequence
  primer
  misc_feature (1)..(22): reverse primer
cccaacgtaagtgtgatacgaa

SEQ ID NO: 8 - DNA, 7388 bp, Diabrotica virgifera
  misc_feature (1)..(7388): WCRW transcript ta0145.001_diavv
catatattccaacgttttttactcaaaagaaaggtagttataaaattaggtagataaagagatagaagataatgatttattatcattaattaaacctagatttggaattaaattcgaagtattacatgtaaaaagaattatgcggaaagtgattcaagataatggtaatactaattatagtaaaaacaggaaccgtaattgtcacttttaaaggtcagtctataccaaaaaatgtaataatagaaaaaaatgatatacgaggtggaaaattatacacccagaataatccaatgtttaaagtgtttgagatttgggcatataagtgcccaatgtagaggaaaagataggtgtgaaagatgtggcgaagaacacaacaaatctaattgttccaatccgaataatttactttgtgtattgtgcaaaggaaaacacagcgctactgacaagggagcagattgtacagaaagacaaaaacaggaatatattaaaaaaattatgaataatgaaaatataacatattatgaagctaataataaatataaaaaatgttattcaacagtaagtaaagaccaagaaaatacttcaaataaatatacaatatctaaacgaaaaagatcaagtagtattgattctagtagtgtagataaagaaacaatggaagcacgcagaaaaattttgcaaacaccaagaatacaaagtcagccttgttataattttaataatcccatttattctaacacaacacaaacacaaaacgataatcaaaataatataggagaaataatagtaaactttatttcagcaacattaaatcaaattaatcacaatttagatcaaaaaacgttggaattattaaaaaacaatatttcacaattattattacctcgtgatggctaacgtttcatttcttcaatggaatgcgagatcaattaaaacaaataagggttatttagaaaaattcttgtatgacaataaaatagatataggattaatatcagaaacttggttaaaaaaaagtaattttattaactttactggttacaatgtctttaggaatgatagagatgatggatatggtggagtagccatcccttccaaaaaattaataaaattttacaacagtcctacttttcaccaaattaatgacataatgtgcaatagcatatcaattaaaattcaatccggaaaaaagttaaacatttattcaatatacgtaaaaccaaatcttaaaatcactctaaatgaatggaaaaagttttttaatagtctagagaagccttttataattggtggtgattttaatagccacaattatgtttggggttgtagtactgtagatactataggaaaaaatctgttagaagctattgaggactgtaatcttgtaattttaaataatggtaaagaaactttgatgcgtagaccgaatagcaataataaatctgcaatagatcttacaatatgctcagcaaatattagtcattttttcgattgggatgttgtggacgagacattaggatcaaatcattttgctattattattaagtcaaatattaatgttaataaagcggaatgtgtaaatacaaaattccaatggaacataaataaagcggattggtctcttttctcttctatcactgataatttcatggaaatagataataatttaaattaccaacaatttttaaataaattaaacgaatattgtaagatatgtataccggagaagagaacagggactaatccacgatttagaaaaacttggtggaatgacaattgtaaaaaggtaatagaagaacaaaaactagctttacgcaagtttaaactacagtctaatatacaaaattatataaattataataaatgtgtagcgaaaaccaaaaaagttgtattagagagtaagcgtaatgcatggagaaatttttgtaaaactttaaacaaaaatacaccaattaaagatatgtggaatcaagccaaacgattacaaaacatttttaaaccacaagtaaatccagtgactgaaggagaatgggttgaggagtttttaagaaaattatgtccagataatatattttcaaaaattaatgtaatggaaagaaaaaactctatgcatccactttcaattccatttagtttctgtgaattagaaataagccttaagaataagaaaaatacttctccaggtatagataatgtacattatattatgttggccaatttacatcaaaaagggaaagaaacactattaaatttttttaatcaaatatggttatcagaagatattccagataactggagagagtaccgggtgattcctattctcaaaacaaatcggaatcctgattcagcagaatcttatagaggtatttcattgagctcctgcataacaaaaacactggaaagaatgataaaacttaggctcgaaagttggctagaaaaaaacaataaattatcacaaacacaatttggatttcgaaaaaatcattctactgtggaagctgtgagtcatttggtaacagatataaatttagcgtttacgaaaaattcttcagtaatcgctcttttattagatgttgaagcagcatacgacaacgttaatttaaatatactatataacaaaatgatacaaataggtctgccagaatgcttctgtcaaaaaataataaaattgtatgactgtagaaaaatttatatatcggtaaataataacacatttggtccaagagtagcgatgggtggtttacctcaaggaggaatattaagccctttgttatatttaatttacacttctgatatagaaaaaaatttaaactcaacaaaaattttacaatttgcagatgatatagttatttatcaagaaaacattaaaatagaaaatgcagtcaaatccattgaagaaggagacaaacatattaaaatatggagtgaattacatggactaaatatatctgattccaaaaccaaattatgtatttttacaagaaaacgaaaagaaatacccaatcacatcttaataaacaatatatcctatcctgtacaaagttatgttaaatatttgggtattactctggatagacagcttctctggaaagaacatatagaccatatagttaaaaaaacagaaaaaggaataaaccttcttcgattcgtatcacacttacgttggggagcagatccaaatatttctttgttgttatttaaaaataatataagagctatattcgactacggatcaatattatacagtgacgcatcacagtgtcatttaaataaaatagacaaaatcattaataaatcccttagattgtgtataggagccctaagaagtacaccgataaataatctacaagttgaatgctgtgaaatgccgatggatataagacgaaaaaaacttggcatcaaccttttagttagattgtatgaaaaaaaggcaagtttaatttccaaaatacatcaactgtttttagcagacttgacagaaaaatattggataaaaaagaaaactctaaatatggtagatttatattcaaaaatgacaatatatgataaacaactttataaatatgacataaacccaaattataatattgactttaatagtatggaacaagttcaggtatactttttaagggactatagcaagttgcctatatctttaagaaaattagtgtttatctccgacagttcacaaatgttcaaagattattgtatgctatatacagatgcatcaaaaaatattgaaggtgtgggatgtgcctattgggatagcagtaataaaattagtaaaatgtttaaactaaattctattatgagtatatacacagctgaattaatagcgataatggaagcactaaaatatttatctaatataaatcattcaaagtttataatttttagtgacagtaaaagttctcttagtaaaattagtgctataaatcctaaatcaaaagtgaactacattgaattatatatcataaataaaattaaagaacttcagcaacaaggaaagtctgttaagttggcatgggttaaaagccactgtggaataactggaaatgaaatggtagatgaattggctaaaaacgcggtgacacaaggagtattaacccattatctttgtacgccaaaagatattgaatcaaatttattcaaagagattaagaaagaatggaaagaaaggtatattgatgaaaacgtaaatacaggaaaccactacagatcaatcagaaactatataacggataaaccttggttttctaaaatggagtcgacaaaagatatgataagaaccatatgcagaatgagatttgaccactgtcttactccatcatatttatttaaaattaatatagctgatagtccacaatgtatttgtggacagttgggcaatctacaacacaaaattttgacctgttctcttatctctaataaagttaatatgtttttaaattcactgtattctttgactgatgtccaccatcccattaatttaaattatttattaacattagaaaataatgagttggtataccgactattgtataaacatattttagatattaagcttaaattgtaattgtaaaatatagagtaagtatttcttgtaaattgttatatgttaaaagaaaaagaaaagaaaagaaaaaaaaagaaaagaaatataaaaaaataataaaataaaataaaaaaaaaaataataaataaataaaaaaataataaaaaaagaaagaaaaaatataaaaaagatatataaaaaaaatagaaaaaaaaatataataattaaaaaaatataaaaaaaaatatgtagataaaaatgaatgacgaacttggacagtccatagtaaaatagctttcgaatgaagtagagggctaaagaagaatgttgcagtttttgctgtggaactctgagaacatcatttggaaaaaaattaataaaatatatatataataaaaattattaaaaaaaatacaaaaataattatttattagtagaattgtttattatattagtattagttttaggataagatacgaaaaaatgactaataaaataaaaaatagtaaaattggcgaatggatttagtgtccgcagtcatataaacccaaacaaacaacaaaagatcaacgaataccataaatctgagtaatattaattgatttttgaagaaatcgtgtcaaaattatttttattatcaatctaatagtaaacttaaagccagtagaagaacaaccggtttttactggacattatttagaccagtcaaatggtttaggttctatatgagtagaataacaagttaaaacaattatatattatcaaaaaattgaaaaaaggatcggctattttatggtaaagggttttttggtcaatttacttattaaatgttaaggaggtaaacattttaaaatggaataaattgttaatcaatttaaaaaaaaaattctacgagttttaaatttgcgtcaaaaggaggcttttgtagtggaaaatatgtgataaaaatttcaaaactattcgttaaatagtttttaaacaattcaatttgcttattataactttgcgaaaatgaagaatcttttacaactaaaaatattttaccacatctcattttgaaggtttttcaataaatcaaccgattcttttatcagtttttttgataaactatataacaaacatcagcattttgcaaggattgagactattgatgggagcacatgttatccacttattttactttttataatacaatattacaataaatctaacttaaaatataaaatttgggatatggcatttaaaaatattaatttcattaccgccgaatttagatttagatgcgcttaaattcattaataaaatttagattaaaccattacttgaactagctttacaaacaaagagagcaacagaatttgaccaaaaaatatatacacctgcttatgagatcagtcagtggcgtgaagcatgtacgtgatcgcgatcatgactgggacagcgatcacataatagggcttttcattcacaatcatttgtttcgagcttctgtcatgtgtcacataatattaatatacagggtgagtcatgaggactcctacctcgtatagaggcccctatggggaacaacaaacgaccactaaaaagtgtctgctcccattgttcaacaatatacagggcgagttcgcattttgacagaaattcatattcgtcacaattcctgaacggtcagatcgatgtgtctcccattctggccaatcgccacactactaccacccaatcaactaattcattcaaactagaaaaaaacaaggcccgccccaaaaaaattagttcgtttgggtcccagaaaaaacttcaccctgtatacactccttgaaaactccaatatgaattttacaaattagacaaataggcaattaaaatggcatatttatttttttccccacacgactactcaatttttattaaaaaatcaaatttgtcaaaatcggaattttaacctaaaaataaaaaaaattaaatcagcgtttaactcgctacaactctgttccattttaatatttttttctgaaatttttacagcacatacctcttaccattgtgaagactatgaaaaattgttgtagactttcagtcttcttctcgtaaaagttatgaatttttaaaaataaaaggtgcagattcgtgaattgcaaagttaaatcgcaaaaattaagtgaaaaaatttaaaatttatctatttgatcacgtctatgttaaactatagagtcccaaaagaagtgttatgggaagttttagatctagacatgttatagaaaaaaaaaatggtaaaacttttaatttgaggaaaaatgttgtttttgtaaattaatttttgtgaaaatcgttaatttttttaaatctatgcaaaaactttgccaaactttttatgcatagtcaaatttgattttttaactaaaaaactaagtaatcgtgtggggaaaaaataaatatgccatttcaatcgcctacctgtctccctgtaaaattcatattagagccctctaaaaaacgttatttttactttttaaggtttttcgttttaaattttttcctaagacccaaacaaactaatttttcaaatccgggcctgatttctctccagtttgaacaaatcagccgattgggtgataacacaaattaaatatttgctcaaaaaaattcatttttgtaataaaagctatttttttcaatgcatggttgactttaccaaactttcaattattcatagtcaaatttgatttttttataaaaaatcaagtaatcgtgtagggaaaaaataatatggaacagagttgtagcgagttaaaccgtgagttcatttttttttcatttttaggttaaaattccg

SEQ ID NO: 9 - DNA, 445 bp, Diabrotica virgifera
  misc_feature (1)..(445): RNAi target sequence
gtttcgtttcatcatcatttgttgtaatttttgtagtaaagcacattaaaaaaaaaatctgttttaaagccatggctgatgaagaatttgacgaaaatgatgtagcagatgatttcgatgacgacgtagaggatgataatatcgaagaactcgaacaacccgaggaagatggagataacatcgatatccttgctccaggacaagcaggaggtggtgtaccaaaaaacaagaggataacaactaaatatatgaccaaatatgagagagccagagtattaggtactagagccttgcaaatagccatgtgtgccccagttatggttgaactagatggtgaaactgatcctctgcaaattgccatgaaggaattaaaacagagaaagattccaattattattagaagatatttacctgaccattcctatgaagattggggaatagacga

SEQ ID NO: 10 - DNA, 20 bp, Artificial Sequence
  primer
  misc_feature (1)..(20): forward primer
gtttcgtttcatcatcattt

SEQ ID NO: 11 - DNA, 22 bp, Artificial Sequence
  primer
  misc_feature (1)..(22): reverse primer
tcgtctattccccaatcttcat

SEQ ID NO: 12 - DNA, 544 bp, Diabrotica virgifera
  misc_feature (1)..(544): WCRW transcript ta02059.001_diavv
ggtttcgtttcatcatcatttgttgtaatttttgtagtaaagcacattaaaaaaaaaatctgttttaaagccatggctgatgaagaatttgacgaaaatgatgtagcagatgatttcgatgacgacgtagaggatgataatatcgaagaactcgaacaacccgaggaagatggagataacatcgatatccttgctccaggacaagcaggaggtggtgtaccaaaaaacaagaggataacaactaaatatatgaccaaatatgagagagccagagtattaggtactagagccttgcaaatagccatgtgtgccccagttatggttgaactagatggtgaaactgatcctctgcaaattgccatgaaggaattaaaacagagaaagattccaattattattagaagatatttacctgaccattcctatgaagattggggaatagacgagctcattattatagatcactagattgtaatttttatgtggatattatttaatacataggtttttataacaaaaaaaaaaaaaaaaaaaaaaaaaaaaa

SEQ ID NO: 13 - DNA, 563 bp, Diabrotica virgifera
  misc_feature (1)..(563): RNAi target sequence
ttggtgattctggtgtaggaaaaagtaacttattgtcaagatttactagaaatgaattcaatttggagtctaaatctactataggtgtcgaattcgctaccagaagtatacaggtggatggtaaaactattaaagcacaaatatgggacacggcaggtcaagagagataccgagcaatcacggcggcctattatcgtggtgcagtcggtgctctactcgtctacgatatcgccaaacatctgacatacgaaaacgttgaacgttggttgcgcgaattgcgcgaccacgcagatcagaacattgtgatcatgttggtcggaaacaaatccgatctgaggcatttgcgcgccgtgctgacagaagaagctaaggctttcgccgaaagaaacggcctcagcttcatcgagacttcagccctagattcgaccaatgtcgataatgctttccaaaatatactcacagagatctatagaattgtttcccaaaaacagatcagagaccctccggaaaataatatgatgccccaacacatgatgaaccaaaaaatgatgcaaccagacatg

SEQ ID NO: 14 - DNA, 22 bp, Artificial Sequence
  primer
  misc_feature (1)..(22): forward primer
ttggtgattctggtgtaggaaa

SEQ ID NO: 15 - DNA, 22 bp, Artificial Sequence
  primer
  misc_feature (1)..(22): reverse primer
catgtctggttgcatcattttt

SEQ ID NO: 16 - DNA, 689 bp, Diabrotica virgifera
  misc_feature (1)..(689): WCRW transcript ta47051.001_diavv
agttgtccttattggtgattctggtgtaggaaaaagtaacttattgtcaagatttactagaaatgaattcaatttggagtctaaatctactataggtgtcgaattcgctaccagaagtatacaggtggatggtaaaactattaaagcacaaatatgggacacggcaggtcaagagagataccgagcaatcacggcggcctattatcgtggtgcagtcggtgctctactcgtctacgatatcgccaaacatctgacatacgaaaacgttgaacgttggttgcgcgaattgcgcgaccacgcagatcagaacattgtgatcatgttggtcggaaacaaatccgatctgaggcatttgcgcgccgtgctgacagaagaagctaaggctttcgccgaaagaaacggcctcagcttcatcgagacttcagccctagattcgaccaatgtcgataatgctttccaaaatatactcacagagatctatagaattgtttcccaaaaacagatcagagaccctccggaaaataatatgatgccccaacacatgatgaaccaaaaaatgatgcaaccagacatgatgatgaataacgaaatgatgaacgaaaaaatgatgatgccccaacacatgatgaaccaaaaaatgatgcaaccagacatgatgatgaataacgaaatgatgaacgaaaaaatga

SEQ ID NO: 17 - DNA, 204 bp, Diabrotica virgifera
  misc_feature (1)..(204): RNAi target sequence
cccaatgccgagatatattgataccgaacaaggcggatcccaagccagatttttgttgtcgaaagtaaatccaagtcaaactcataacaacatgtattcctacggaggtgattctggagctccagttttgacagatgatgtatcccttcaagtattcatggaccatctaaagaaattggcagtttcgtccacagcataatacct

SEQ ID NO: 18 - DNA, 20 bp, Artificial Sequence
  primer
  misc_feature (1)..(20): forward primer
cccaatgccgagatatattg

SEQ ID NO: 19 - DNA, 20 bp, Artificial Sequence
  primer
  misc_feature (1)..(20): reverse primer
aggtattatgctgtggacga

SEQ ID NO: 20 - DNA, 2636 bp, Diabrotica virgifera
  misc_feature (1)..(2636): WCRW transcript ta01733.001_diavv
gcacgaggcagacacgacatcgaatgacgtggaagttcaaattctgaaacaattaggtgtaatttttaggagctcaataatagtgttatttacatgatagaatcctaataatatatattgaggaatttccttagggaattccgacttgtaatcttcaaaaatgagcacatatgaagagtatatacaacaaaatgaagatcgagatgggattagatttacctggaatgtatggccttcaagcagaattgaagctacccgtctcgtagtacccttagcttgtctgtaccagcctataaaggaacgtctggatcttccaccaatacaatatgaccctgttttatgtactagaaatacttgtagagcaatattaaacccactgtgtcaggtagattatcgagcaaaactctgggtatgcaacttttgtttccagagaaatccatttccacctcaatatgctgctatttcagaacaacatcaaccagcggaattgatgcctatgttttccaccattgaatacacaataactagagctcaatgtttaccaccaatatttttgtatgttgttgacacctgcatggatgatgaagaactgggttccctgaaagactcattgcaaatgtcccttagtttgttgccacctaatgcgttaataggactaataacatttgggaaaatggttcaagttcatgaacttggcactgaaggttgtagtaagtcatatgtgttcagaggtacaaaagatcttagtgctaaacaggttcaagaaatgctgggaataggcaaagtggctttaggtcagcaagcccctcaacagccagggcagcctctaagacctgggcaaatgcaacctactgttgttgcaccaggaagcaggtttctacaacctgtatccaaatgcgatatgaatctaacagacctaataggagaacaacagaaagatccttggcctgttcatcagggtaaaaggtatttaagatctacaggtgtagctttatcgattgccattggtttgttagaatgtacatattccaatactggcgcccgagttatgctatttgttggaggaccttgctcacaaggacctggtcaggtagttaatgatgatttaaaacagcctattagatcacatcatgatattcagaaagataatgcaaaatatatgaagaaaggtattaaacattatgatgcgttagcaatgagagccgcaactaatggtcactctgttgatatttattcttgtgctttggatcagacaggtctgatggaaatgaagcaatgctgtaattctactgggggacacatggtaatgggggattcatttaattcttccttgtttaagcaaactttccaacgtgtgtttaccagagatcaaaaaagtgatctgaaaatggcatttaacggtactttggaagtgaagtgttcccgagaattaaaagttcaaggaggtatcggttcgtgtgtatcacttaacgtgaagagccccttggtttccgacacagaaataggaatgggtaatactgtgcaatggaaaatgtgtactttaacgccaagtactaccatgtctttattctttgaggtcgtaaatcaacattctgctcccatacctcaaggtggtagaggttgtatacaatttattacgcagtaccagcattcaagtggtcaaagaaaaatcagagtaacaacagtggctcgaaattgggctgacgcaactgctaatatacaccatatcagtgccggattcgatcaagaagctgctgctgtaataatggctaggatggccgtttatagggcagaatctgatgatagtccagatgttcttagatgggttgacagaatgctgattagattgtgtcaaaaattcggagaatacaataaggacgaccccaattcattcagacttggtcaaaacttcagtctttacccacagttcatgtatcacttaagaagatctcaatttcttcaagtattcaataattctccggacgagacttcattctacagacacatgttgatgagggaagatcttactcaatctttgataatgattcaacctattttgtatagttatagtttcaatggtccaccagagcctgtattactagatactagctccattcaacctgacagaatattacttatggatactttcttccaaatattaattttccatggagagactatcgcccaatggcgtagtttaaaatatcaagacatgccagaatatgaaaactttagacagctactacaggctccagtagatgatgcacaagaaattttgcaaactaggttcccaatgccgagatatattgataccgaacaaggcggatcccaagccagatttttgttgtcgaaagtaaatccaagtcaaactcataacaacatgtattcctacggaggtgattctggagctccagttttgacagatgatgtatcccttcaagtattcatggaccatctaaagaaattggcagtttcgtccacagcataatacctatatattacaattagatacatttgacataatacagtttttgaatttattcaatatattatattttaagcttaatttttttgtatatttatttcatagatagtttatatatttggtaatgtgatacaataaatttttgttttcc

SEQ ID NO: 21 - DNA, 599 bp, Diabrotica virgifera
  misc_feature (1)..(599): RNAi target sequence
acaaatgtggtggtatcgacaaacgtaccatcgaaaagttcgaaaaagaagcccaagaaatgggtaaaggttcattcaaatatgcctgggtactcgacaaacttaaggccgagagagaacgtggtattaccattgatattgctttgtggaaattcgaaacagctaaatactatgtaaccatcattgatgcccctggacacagagatttcattaagaacatgatcactggtacatcacaagctgactgtgctgtactcattgttgcagctggtactggtgaatttgaagcaggtatttcaaagaatggacaaacacgtgaacatgctcttcttgctttcacccttggtgtaaaacaacttattgttggtgtcaacaaaatggactcgactgaaccagcatacagtgaatcacgtttcgaggaaatcaagaaggaagtatcctcatacatcaagaaaattggttacaacccagctgccgttgctttcgtaccaatttcaggatggcacggagacaacatgttagaaggatctgacaagatgccatggttcaagggatggcaaatcgaacgtaaagaaggaaaagctgaaggaaagtgcttg

SEQ ID NO: 22 - DNA, 22 bp, Artificial Sequence
  primer
  misc_feature (1)..(22): forward primer
acaaatgtggtggtatcgacaa

SEQ ID NO: 23 - DNA, 22 bp, Artificial Sequence
  primer
  misc_feature (1)..(22): reverse primer
caagcactttccttcagctttt

SEQ ID NO: 24 - DNA, 1698 bp, Diabrotica virgifera
  misc_feature (1)..(1698): WCRW transcript ta04714.004_diavv
gggatcttcctttttaatttgctcgtcgtacggtgtggacctcgcgcctggtgttacatcccaagtagtgttccttttattctaagtttaatttcgaacagttgcatttactttatttccaaacaatcaaaatgggtaaagaaaagattcatattaacatcgttgtcattggacacgtagattctggtaaatctactactactggacatttaatttacaaatgtggtggtatcgacaaacgtaccatcgaaaagttcgaaaaagaagcccaagaaatgggtaaaggttcattcaaatatgcctgggtactcgacaaacttaaggccgagagagaacgtggtattaccattgatattgctttgtggaaattcgaaacagctaaatactatgtaaccatcattgatgcccctggacacagagatttcattaagaacatgatcactggtacatcacaagctgactgtgctgtactcattgttgcagctggtactggtgaatttgaagcaggtatttcaaagaatggacaaacacgtgaacatgctcttcttgctttcacccttggtgtaaaacaacttattgttggtgtcaacaaaatggactcgactgaaccagcatacagtgaatcacgtttcgaggaaatcaagaaggaagtatcctcatacatcaagaaaattggttacaacccagctgccgttgctttcgtaccaatttcaggatggcacggagacaacatgttagaaggatctgacaagatgccatggttcaagggatggcaaatcgaacgtaaagaaggaaaagctgaaggaaagtgcttgattgaggctttggatgctatccttcccccatctcgtccaactgagaaacccctccgtcttccactccaggatgtctacaaaattggtggtattggaacagtacctgtaggtcgtgttgaaactggtgtattgaaacctggtatggttgtagtattcgctccagccaatttgacgactgaagtaaaatccgttgaaatgcatcacgaagccctccaggaagcagtacctggtgacaatgttggtttcaacgtcaagaatgtctctgttaaagaattgcgtcgtggttacgtagctggagacaccaagaacaacccacccagaggagcttcagacttcactgcccaagtcattgttctcaaccaccctggtcaaatctcaaacggatatacccctgtactcgactgtcacacagctcacattgcctgcaaattcgctgaaatcaaagaaaaggttgaccgtcgttctggtaagaccactgaagaaaatcccaaagccatcaaatctggtgatgccgccattgtcaacttggtacccaccaagcccatgtgtgtagaatcattccaagaattcccaccccttggacgttttgctgtccgtgacatgaggcaaaccgttgcagtaggagtcatcaagagcgttgccttcaaagatcccagcgccggaaaagtcacaaaagctgcagaaaaagcccaaaagaagaaatagtctatttggactccactacttaaataattttgatatgttttgtttcttttatatattaatattggagtatcaatgtatttttaataactaatggacttattacttgcattgcattatttgtgatctgtaaattaaacttggacaaataaagaaaaaaattaaaaaaaaaaaaaaaaaa

SEQ ID NO: 25 - DNA, 550 bp, Diabrotica virgifera
  misc_feature (1)..(550): RNAi target sequence
ccagggaaagagagaagtacgataatttagcagatttgtatgctgtaataaacactttgcaacaattagagaaggcatatattcgagattgtgtagtggcaaaggaatatacaggagcttgtagtaaattattagttcagtataaggctgcgtttcgacaagtcaagagtgatgaatttcctacaccagacgcctttgttaagaagtacaggcttgactgtcctgcagctttagaacgtatcaaggaagataggccaatcactatcaaagacgacaaaggcaacactagtcgatgcattgctgatatcgtatcgctattcatcactataatggacaaactgcggttggacattcgttcgatggataacttacatcctgacgtgagggacttagtagatactatgaacagacttagcattctgccatcggatttcgatggaaaggtaaaagtggctgaatggttaaatactttaaatgaaatgcaggcctctgatgaattatccgaagctcaagtgaggcaactgttgtttgatcttgaaagtgcgtatgc

SEQ ID NO: 26 - DNA, 22 bp, Artificial Sequence
  primer
  misc_feature (1)..(22): forward primer
ccagggaaagagagaagtacga

SEQ ID NO: 27 - DNA, 22 bp, Artificial Sequence
  primer
  misc_feature (1)..(22): reverse primer
gcatacgcactttcaagatcaa

SEQ ID NO: 28 - DNA, 769 bp, Diabrotica virgifera
  misc_feature (1)..(769): WCRW transcript ta01620.001_diavv
atataaatagaaaaatgtcagcagaaaatcgccctgagctgtatgaggaagtcaagctatatcacaatgccagggaaagagagaagtacgataatttagcagatttgtatgctgtaataaacactttgcaacaattagagaaggcatatattcgagattgtgtagtggcaaaggaatatacaggagcttgtagtaaattattagttcagtataaggctgcgtttcgacaagtcaagagtgatgaatttcctacaccagacgcctttgttaagaagtacaggcttgactgtcctgcagctttagaacgtatcaaggaagataggccaatcactatcaaagacgacaaaggcaacactagtcgatgcattgctgatatcgtatcgctattcatcactataatggacaaactgcggttggacattcgttcgatggataacttacatcctgacgtgagggacttagtagatactatgaacagacttagcattctgccatcggatttcgatggaaaggtaaaagtggctgaatggttaaatactttaaatgaaatgcaggcctctgatgaattatccgaagctcaagtgaggcaactgttgtttgatcttgaaagtgcgtatgcgtcctttaataaagtccttcataattctgcctaaatgtacgagatagttgttatgattgttacacgtttatgtaaatattataagcaaaaaaaattgagctagatagttattggcaatgtatgcatttatcaattttaaccctaattgga

SEQ ID NO: 29 - DNA, 578 bp, Diabrotica virgifera
  misc_feature (1)..(578): RNAi target sequence
aatccaaaagctgaagtggctagagctgcacaagccctagccgttaatatatcagcggcaaaaggcattcaagatgtaatgaagtcaaaccttggtcccaaaggaacagtgaaaatgttggtatctggtgccggcgatataaaaataaccaaagatggaaacgttctattgcacgaaatgcaaattcaacaccccacggcttcccttattgctcgagcctcaactgcccaagatgatatgaccggcgacggcactacatcgactgtgttagtcataggtgaactattaaaacaagcagatatttacatagcagaaggtctccaccctagattgttaacagatggctttgataaggctaggacaaaagcgttggaagtactggagaaaatgaagatttcaattgaagcgaacaaagaaactttaacagatatttgcaggacgagtttaagaacaaagctgcatcaaaaactggctgatgttttgacagacgtttgtgtggatgctgttctagctataaagaaagatggcaaacctgttgatcttcatatggttgaattaatggaaatgcagcacaaaac

SEQ ID NO: 30 - DNA, 20 bp, Artificial Sequence
  primer
  misc_feature (1)..(20): forward primer
aatccaaaagctgaagtggc

SEQ ID NO: 31 - DNA, 20 bp, Artificial Sequence
  primer
  misc_feature (1)..(20): reverse primer
gttttgtgctgcatttccat

SEQ ID NO: 32 - DNA, 1864 bp, Diabrotica virgifera
  misc_feature (1)..(1864): WCRW transcript ta00896.001_diavv
gggggtcaaaaattttgggttggctcaacacgagttttctattttatttgaaaaaatagtattttaaataatggctatcagtttgttaaatccaaaagctgaagtggctagagctgcacaagccctagccgttaatatatcagcggcaaaaggcattcaagatgtaatgaagtcaaaccttggtcccaaaggaacagtgaaaatgttggtatctggtgccggcgatataaaaataaccaaagatggaaacgttctattgcacgaaatgcaaattcaacaccccacggcttcccttattgctcgagcctcaactgcccaagatgatatgaccggcgacggcactacatcgactgtgttagtcataggtgaactattaaaacaagcagatatttacatagcagaaggtctccaccctagattgttaacagatggctttgataaggctaggacaaaagcgttggaagtactggagaaaatgaagatttcaattgaagcgaacaaagaaactttaacagatatttgcaggacgagtttaagaacaaagctgcatcaaaaactggctgatgttttgacagacgtttgtgtggatgctgttctagctataaagaaagatggcaaacctgttgatcttcatatggttgaattaatggaaatgcagcacaaaacagaaacagatactcagttaattaagggtttagtcctggaccatggctcccgtcatccagatatgcctaaaagtctcaacaactgctacattttaacatgtaatgtcagcatggaatatgaaaaaagtgaagtcaattcaggattcttctacaaaactgcagaagagagagaaaaattagtgactgcagagcgtgaattcattgagcagagagttaagaaagtcattgaactgaaaaggtcactctgtaatggaactgataagacttttgttgttattaaccaaaaaggtattgaccccatgagcctggatatgcttgccaaagaaggaataatagctctcagaagagctaagagacgtaacatggagcgtctatcattggcttgtggtggagtagctatgaacagctttgatgatctgcaagaatctcaacttggtagagccggacatgtatatgaacatgtgttgggagaaaataagtatacatttgtggaagattgcaaaattcctcaatcagttactattttaatgaaagggccaaataaacatactttgactcagattaaagatgcagttagagatggattaagggctatcaataatgccattgacgataaagcagttattccaggtgctggtgcatttgaagtcacagccaataaagaattgctagcatttaaagacactgttaagggtaaagctcgtctaggagttgccgcttatgcagaagctttactggtagttcccaagactttggctgttaactctggatttgatgcacaggacaccattctaaaactacaagaagaatcccgtttgaatccagacccaatcggtttagatctaacctctggggaacccatcaatcctaaagatgctggcatctatgacaactatattgttaaaaaacaaataatcaattcctgttcggtcattgccagcaacctcttattggttgatgaaattatgagggctggaatgagcagcttaaagggataaaatcgaagtattcaaatttaaatctgtatttttgtgcttgttttaatttatcattacattatgtattttcttaacctctgaaaggttgctacttaatatttagtggacatacacataatgctgtaacgttgataacatacacacgtaacatttataatatttgcaataataaaatgtcaaaaaaaaaaaaaaaaaatgcga

SEQ ID NO: 33 - DNA, 709 bp, Diabrotica virgifera
  misc_feature (1)..(709): RNAi target sequence
gaaaatgccaaccaaagtcttcgagaagagctgtcctttaaggatcagatccatcaacaacagttgacagaaactcgtactcgtcgtcaagtagaaatcagcgaaatcgacggtcgcctggcagaaaaatatgaggctaagcttcaagaggctctacaagaactcagagatcaatatgaaagtcaaatggccaacaaccgtggcgaaatcgagttgctttacgaacagaagattaagaacttgcaatcagctaatgacagacatgctgcctctgcctccggtgctcttgacgaattgagacaagttagaaccagaatcgatactttgaattctcgaattagcgatttagagaaccagaacgctggcttagcagctcgtgctagagatttggagaagttgttagagaatgagcgcatgcgccatgtggaagacctcgcaatgttagaaagagaattgcatagactccgagaagaaatggctaatcaacttcaagaataccaggatcttatggacattaaggtttctcttgatttagagatagctgcttatcggaaactgctcgaatctgaagaagctcgtcttaatattaccccaacaggtagtgaagttcatgaagtaactcacagtaggagccaacgcagctcgtcgcaacgtcgcactccagtcagattgggagccaaaagaaagcgaacactactcgaagaaagcc

SEQ ID NO: 34 - DNA, 22 bp, Artificial Sequence
  primer
  misc_feature (1)..(22): forward primer
gaaaatgccaaccaaagtcttc

SEQ ID NO: 35 - DNA, 22 bp, Artificial Sequence
  primer
  misc_feature (1)..(22): reverse primer
ggctttcttcgagtagtgttcg

SEQ ID NO: 36 - DNA, 2662 bp, Diabrotica virgifera
  misc_feature (1)..(2662): WCRW transcript ta03354.001_diavv
aaaaaccgttaaacgccgctcccatcatatcatctccaaaaatagtttgattacctcgggtagaccgcgacataatttgtgcttcgaccgatctctctctttgagttgtcgcttttcgaggtatttagttgcaggcgtggtgtatacgttgaaatagtgatttttgttaaaagtgagtaaatatggcatcgaaatcaaaaaaagggtcaacaccgttagcttcacagcggccggcgagccccttaagtcctaccagacattctagattacaggagaagcatgaacttcagaatcttaacgaccgtttggcgggatatatagatcgagtaaggtatttagaaggtgaaaacaacagattaacgagggaaatacaaagtacccaggaaacagtaacaagggaagtttcaaacattaaatctatgtatgaccatgaattatcagatgctagaaaactattagacgagacccaccgtgaaaaagcacgtttagagatagatgttaaacgtcttttagaagagaatgacgaactcaagtctgagttagcaaagaagaacaaggatttggctctagctgagaattctgccaggatatacgagaccagatgtaacgagttacagctcaaagcaaatcaagcggctgctgatgctaagaaagctattgcagatgctaaggaacttgagaaagaacgtgataagctacgcaaacttcttgataatcatcgtaaacagttagaagaagaatcattagcgagagtggaagtcgaaaatgccaaccaaagtcttcgagaagagctgtcctttaaggatcagatccatcaacaacagttgacagaaactcgtactcgtcgtcaagtagaaatcagcgaaatcgacggtcgcctggcagaaaaatatgaggctaagcttcaagaggctctacaagaactcagagatcaatatgaaagtcaaatggccaacaaccgtggcgaaatcgagttgctttacgaacagaagattaagaacttgcaatcagctaatgacagacatgctgcctctgcctccggtgctcttgacgaattgagacaagttagaaccagaatcgatactttgaattctcgaattagcgatttagagaaccagaacgctggcttagcagctcgtgctagagatttggagaagttgttagagaatgagcgcatgcgccatgtggaagacctcgcaatgttagaaagagaattgcatagactccgagaagaaatggctaatcaacttcaagaataccaggatcttatggacattaaggtttctcttgatttagagatagctgcttatcggaaactgctcgaatctgaagaagctcgtcttaatattaccccaacaggtagtgaagttcatgaagtaactcacagtaggagccaacgcagctcgtcgcaacgtcgcactccagtcagattgggagccaaaagaaagcgaacactactcgaagaaagccaagagtcaagcatgaatgactatacggtgaacagctcctcaaaaggtgacattgaagtcgctgatgtcgatccagaaggacactatgttaagttgcacaataaaagtaatcaagaagtcgcacttggaggatggcaagtcattagacgtgttggtgaggaggaaactacattcaaatttcacaggtcactaaagcttgaaggtaatggatttgtaacaatatggagctctgacctcaacaaagatcatgaacctccaactaatttagttatgaagagtcagaaatgggttgtaggtgataacatggtcaccacattattgaataataacggagatgaagtagctgtctccgaaagagttaaaaggcaattaacaagctcccatctaagacacagagaactagcagctggctacctctcagaagaactccaccatcaacagggtgatccacaagtagatgaaagatgtaggcttatgtaaagttaacacatctcatttaatttttttatttacagttaaggttggaatgttacagaagtaggttgtgctccttacttacgctttttaaactattttttaagtgatgttcttaatattataagattctaggacagaaggaacacaacttatactgttattgacaaaaaacttactgaaaattgcaattagacaacagtagtaagtttaatactaagaatacaggatgaggtaataattattattctttatataaactgtctttttaggagttttatatatattttttaaatatcttgcatataagtcttgaattacagttgtcatttttataaatttaaacctgaaaaatacattatttcgcattaatacctcatcctgttcgatagtttcttaagatagataacaaactgccagttcgataagttttcttttaactaacacaattgtttattagtataatataattttgaaaaattactgtactgttgtccccaaaacattaaagtgttctgcatttatttaaagaataataaactttttatattaatggtagttcttttgtttttgaggtttttcactcagctgtttacgcttgttttagttagataggtgttgcaaaaactatagggataaaaatctagatttggtttcagttacttgtattatattttattgtatatctttattcttgatcttcgaaacttaaatctgta

SEQ ID NO: 37 - DNA, 635 bp, Diabrotica virgifera
  misc_feature (1)..(635): RNAi target sequence
aatggctttacacgtccctaaagcaccgggctttgcccagatgttaaaagaaggagccaggcactattctggtttggaagaagctgttataagaaacataatagcatgcaaggaatttgcacaatccgtaaaaactgcctatggtccaaatggtatgaataaaatggtcattaatcacattgagaaacaatttgtcacaagtgatgcagctacaattatgcgagaactagatattgaacatccagcagccaaactcatgatactaggaagtcaaatgcaagattctgaggtgggtgatggaactaactttgtgattatacttgctggagcacttttggagcatgctgaagaactaattcgtcttggagtaactcccacagaaatagcagaaggttatgagaaagcactagacaaatgtctagaaatccttcctaatcttatttgctacacaatcaaggatttcagaaacatcgaagaagtcaaaaagggcatacaaacctcaattcaatctaagcagtatggcaatgaagagtttctatcaaaacttattgcagaagcttgtgtgtcaattttgccagaagaaacaacatttaatgttgataatgttagaatatgtaaagttttggggtctggtt

SEQ ID NO: 38 - DNA, 22 bp, Artificial Sequence
  primer
  misc_feature (1)..(22): forward primer
aatggctttacacgtccctaaa

SEQ ID NO: 39 - DNA, 22 bp, Artificial Sequence
  primer
  misc_feature (1)..(22): reverse primer
aaccagaccccaaaactttaca

SEQ ID NO: 40 - DNA, 1866 bp, Diabrotica virgifera
  misc_feature (1)..(1866): WCRW transcript ta04788.001_diavv
ggaactctatggtcttcagtcactctaaataaaatcctataaccttttttgggatttcaattcgaattaaataaatttcttcagaaacatacaagaaacaaatacagacaatggctttacacgtccctaaagcaccgggctttgcccagatgttaaaagaaggagccaggcactattctggtttggaagaagctgttataagaaacataatagcatgcaaggaatttgcacaatccgtaaaaactgcctatggtccaaatggtatgaataaaatggtcattaatcacattgagaaacaatttgtcacaagtgatgcagctacaattatgcgagaactagatatagaacacccagcagccaaactcatgatactaggaagtcaaatgcaagattctgaggtgggtgatggaactaactttgtgattatacttgctggagcacttttggagcatgctgaagaactaattcgtcttggagtaactcccacagaaatagcagaaggttatgagaaagcactagacaaatgtctagaaatccttcctaatcttatttgctacacaatcaaggatttcagaaacatcgaagaagtcaaaaagggcatacaaacctcaattcaatctaagcagtatggcaatgaagagtttctatcaaaacttattgcagaagcttgtgtgtcaattttgccagaagaaacaacatttaatgttgataatgttagaatatgtaaagttttggggtctggtttacataactctcaggttgtacaaggtatggttttcaaaagacaagttgaaggggaaataactaaagcagaaaaagctaaaattgctgtattcagctgtgctgttgatattatgcaaacagaaactaaaggaactgtacttatcaaaactgcagatgaacttatgaactttagtaggggagaagaaaatcttcttgaattacaaatcaaatgtatagcagatgctggagctaaagttgtagttgcaggagccaaatttggagatatggctctacattacttacataaatatggcatgatggttgtcaggttgaactccaaatttgatttgagaagattatgcaaaactgttggtgctacttgtcttccacgcctaacagctcccacatctcaagaacttggttacgcagatattgtatgtgtagaagaattgggtgatacccctatagtttctttcagattggagggcaaagaatcaagaatttccacaattgtcatcagaggtgctactgacaattacatggatgacattgaaagagcaattgatgatggagttaatacatttaagggaatctctcgagatggcagatttgttcctggtgccggcgccgttgaagcagagttagctgttcagctgactaaatatgcagacactcttccaggcttagaacagtatgctgtcagaaaattcgcatctgcccttgaaagttttcccaaaacgttggcagataatagtggacacaaatccacagcagtattagaaaaaatattggaagctcaccagaatggtcagaaaaatgttggagttgacatagaagctgaaagtgcagtatgtgacgctttggaaaagaacatcttggacctttatcaatgtaaatattggggactgaagtatgctgtaggagcagcagcaaccattttaagagtcgaccaaattattatggcgaaaagggcaggtgggccaaaagttaggcaaccaaagggaagtgatgacgaatcttgaaatcgttaattttgcgcttggtttctcgtatacacttaaattcaccttacaactcacttgtattaatctgttaatttaattttttaattaatatttcttaaccaaaaaaaaaaaaaaaaaa

SEQ ID NO: 41 - DNA, 579 bp, Diabrotica virgifera
  misc_feature (1)..(579): RNAi target sequence
ccagagacttcatatcccaaccaagactcacttacaaaactgtatctggtgtcaacggtccactagtaatcctcgaagatgtcaaatttcctaagttcaacgaaattgtccaactcagattatctgacggaagtttaagatcaggtcaagtacttgaagtcagcggttccaaggctgtagtacaagtattcgaaggtacatcaggtatcgatgccaaacacactgtctgtgagttcacaggagatattctcagaactccagtctctgaggatatgttgggaagagtattcaacggctctggaaaacctattgacaaaggtcccccaattctggctgaagactacctagatattcaaggacaacccatcaacccatggtcccgtatctacccagaggaaatgatccaaactggtatcactgccatcgatgtgatgaactcgattgcccgtggtcagaagattcccattttctcagctgctggtctgccacataacgatattgctgcccaaatttgtaggcaagccggtcttgtcaaaatcccaggcaaatcagttttggatgaccacgaagacaactttg

SEQ ID NO: 42 - DNA, 22 bp, Artificial Sequence
  primer
  misc_feature (1)..(22): forward primer
ccagagacttcatatcccaacc

SEQ ID NO: 43 - DNA, 22 bp, Artificial Sequence
  primer
  misc_feature (1)..(22): reverse primer
caaagttgtcttcgtggtcatc

SEQ ID NO: 44 - DNA, 2471 bp, Diabrotica virgifera
  misc_feature (1)..(2471): WCRW transcript ta00620.009_diavv
tcttaaacttccgtcagataatctgagttgctaattttttactgtctttgatagacgtctcctgtacacgtaaaaatggcttcgacgatatcggcaagacaggctaacagagaacatgttttggccgtatccagagacttcatatcccaaccaagactcacttacaaaactgtatctggtgtcaacggtccactagtaatcctcgaagatgtcaaatttcctaagttcaacgaaattgtccaactcagattatctgacggaagtttaagatcaggtcaagtacttgaagtcagcggttccaaggctgtagtacaagtattcgaaggtacatcaggtatcgatgccaaacacactgtctgtgagttcacaggagatattctcagaactccagtctctgaggatatgttgggaagagtattcaacggctctggaaaacctattgacaaaggtcccccaattctggctgaagactacctagatattcaaggacaacccatcaacccatggtcccgtatctacccagaggaaatgatccaaactggtatcactgccatcgatgtgatgaactcgattgcccgtggtcagaagattcccattttctcagctgctggtctgccacataacgatattgctgcccaaatttgtaggcaagccggtcttgtcaaaatcccaggcaaatcagttttggatgaccacgaagacaactttgccatcgtgttcgctgctatgggtgttaacatggagactgctagattcttcaaacaagatttcgaagaaaatggttctatggaaaacgtatgtttgttcttgaacttggctaacgatccaaccatcgaaagaatcatcaccccacgtcttgctctaacagccgctgaattcttggcttaccagtgcgaaaaacacgtgttagtcattttaactgacatgtcttcatacgctgaagctttgcgtgaggtatctgccgccagagaggaagtacccggtcgtcgtggtttccccggttacatgtacaccgatttggccaccatctacgaacgtgccggtcgtgtcgaaggccgtaacggttccatcactcaaatccccatcttgactatgcctaacgacgatattactcaccctattcccgatttgacaggttatattaccgaaggacagatctacgtcgaccgtcaattgcacaacaggcagatctacccaccaattaacgtactgccatctctctcacgtttgatgaagtctgctatcggcgaaggtatgaccaggaaggaccactctgacgtttctaaccagttgtatgcttgctatgctatcggtaaggacgtccaggccatgaaagccgtagtaggtgaagaagctctaacacccgacgatcttctctacctcgagttcctaacgaaattcgaaaagaacttcatcacccaaggaaactacgaaaaccgcaccgtcttcgagtctttggacatcggctggcaactactccgtatcttccctaaggaaatgttgaaacgtatccctgcaagcacattggcggaattctatccaagagactctcgtcactagttggtttatgtataaaatttatatatatttaggaagtttgttaggtttgttacaaatatgtccacttattgtatcgattattttcaattgagagatattttaccaaaacaatttgagccgatgagattctacggtgtaatttttgtaaatacttaaagagcgtgtttcaaaaatgcgcttaatataatatattatcaatacagagcaacctttttttctttattgtttttttcactccaaagttcttgaactcctaaaaggagcatagagcttcagtgaaaaggcgccatcccctcattccaagactttccttgacctcttaccaattgttggaaaaattataactcagattaattttattaggtgacagttccataagtaaaaatatgcaatggctatatattgcgtactaaacttaagaagaaaaattgtgtcgctctggaagaaagattacttgcataagaatgaaaatcagtgtcatattttgcgtttatgacatccctagacgatactattttttcgttactatattttttttaaagagatcaagagcaacaatttggagactgatattcttatgcgagttgttttcctactttgtcctattttgaagagtctacaattatttacttaccatttgattaaattagatgaacataagacaatactatatttttatcatgtaagttgatattccctatgtaaattattggcacaatgtaacctccaacttgatttatacatttattttacttttgtttgtctattttttctgtaatagagtggaagaattaacattccattaaatgtcattgcccaatgtataaagcaatatacctcttaccattcgatgctttttcagtattttaattctagatggtgaacggagatttttcttgatgtaggttttg

SEQ ID NO: 45 - DNA, 670 bp, Diabrotica virgifera
  misc_feature (1)..(670): RNAi target sequence
tcgtaatttttggttgtgcttgagaaaatcgtcaaacatccaaaatggtgaacttcaccgtagatgaaattagggccatgatggacaaaaagaggaacatccgtaacatgtccgtcattgcccatgtggaccatggtaaatctacattaacagattctctagtatcaaaagctggtattattgctggtgccaaagctggagaaaccagattcacagacacaaggaaagatgaacaggaacgttgtattaccatcaaatcaactgccatatctatgttcttcgagttagatgataaagatcttgtgttcatcaccaacgctgaccaacgtgagaaagatgtgaaaggtttcttgattaaccttattgactctcctggacacgttgatttctcatcagaagtaacagctgcccttcgtgtcactgatggtgcccttgtagtagtagattgtgtatctggtgtatgtgtacagactgaaactgtactccgtcaagctattgcagaacgtattaagccaattttattcatgaacaagatggaccgtgccctcttagaattacagttggaatctgaagaactttaccagactttccaacgtattgttgaaaacgtcaacgtcattattgccacctacaacgatgattcaggtccaatgggtgaagtcagagttga

SEQ ID NO: 46 - DNA, 22 bp, Artificial Sequence
  primer
  misc_feature (1)..(22): forward primer
tcgtaatttttggttgtgcttg

SEQ ID NO: 47 - DNA, 22 bp, Artificial Sequence
  primer
  misc_feature (1)..(22): reverse primer
tcaactctgacttcacccattg

SEQ ID NO: 48 - DNA, 4535 bp, Diabrotica virgifera
  misc_feature (1)..(4535): WCRW transcript ta02030.005_diavv
ggggggcagagagtcggtctctttctttcacgggagtgcgccatcgttggcgtatcgtaatttttggttgtgcttgagaaaatcgtcaaacatccaaaatggtgaacttcaccgtagatgaaattagggccatgatggacaaaaagaggaacatccgtaacatgtccgtcattgcccatgtggaccatggtaaatctacattaacagattctctagtatcaaaagctggtattattgctggtgccaaagctggagaaaccagattcacagacacaaggaaagatgaacaggaacgttgtattaccatcaaatcaactgccatatctatgttcttcgagttagatgataaagatcttgtgttcatcaccaacgctgaccaacgtgagaaagatgtgaaaggtttcttgattaaccttattgactctcctggacacgttgatttctcatcagaagtaacagctgcccttcgtgtcactgatggtgcccttgtagtagtagattgtgtatctggtgtatgtgtacagactgaaactgtactccgtcaagctattgcagaacgtattaagccaattttattcatgaacaagatggaccgtgccctcttagaattacagttggaatctgaagaactttaccagactttccaacgtattgttgaaaacgtcaacgtcattattgccacctacaacgatgattcaggtccaatgggtgaagtcagagttgaccccagcaaaggttcagttggttttggatcaggtctccacggatgggctttcactctcaaacaattctctgaaatgtatgccgagaaattcaagattgatgtagttaaactaatgaaccgtttgtggggtgagaacttcttcaaccccaaaaccaagaaatggtccaaacaaaaggatgatgataacaaacgttcattctgtatgtacatcttagatccaatctacaagatttttgactccatcatgaactacaagaaagaagaatatgaagcactccttccaaaattgggtattgccttaaaacatgaagataaagacaaagatggtaaacaattattgaaagtagttatgcgtacctggttgccagctggagaagctttacttcagatgatagccattcacttaccatcacctgtggtagcacagaaatacagaatggaaatgttgtacgaaggacctcatgatgatgaagcagctgttggtatcaagaactgtgatccaaatgcacctcttatgatgtatgtatctaaaatggtacccacttctgacaaaggtcgtttctatgcttttggtcgtgtattctctggtaaagtagctactggtatgaaagcccgtatcatgggacccaactacacccctggcaaaaaggaagatttatatgaaaaggctatccaacgtaccattctcatgatgggtcgttatgttgaagctattgaagatgtcccatctggtaacatctgtggtttggttggtgttgatcaattcttggttaagactggtaccattaccactttcaaggatgcccacaacttgaaggtcatgaaattcagtgtatctcctgtagtacgtgttgctgttgaacctaagaaccctgctgatttgccaaaacttgtagaaggtttgaaacgtttgaccaaatccgatcctatggtccaatgtatcattgaagaatctggtgagcacatcattgctggtgccggagaattgcatcttgaaatttgccttaaggatcttgaagaagatcatgcctgcattcccattaagaaatctgaccctgttgtatcctaccgtgagacagtaagtgaagagtctgatcagatgtgcctctcaaaatcacccaacaaacacaacagattgttcatgaaagcttgtcctatgcctgatggacttgctgaagatattgatgatggtaaagttaacccacgtgatgacttcaaagtccgtgcccgttatcttactgagaaatatgactatgatataactgaagcccgtaagatctggtgctttggacctgatggtactggacccaacatccttgttgattgtactaagggagtgcaatatcttaatgaaatcaaagactctgtggtagctggtttccaatgggcaaccaaagaaggtgtcttgtctgaagaaaacttgagaggtgttagattcaacatttatgatgttaccttacacgctgatgctatccatcgtggaggtggtcaaatcattccaacaacccgtaggtgtttgtatgcttgtttaatgacagctgcacccagacttatggaacctatctacaagtgtgaaattatgtgtcctgaagttgctgttggtggtatttatggtgtattgaacagaagacgtggtcacgtatttgaagaagctcaaatcgctggtacacctatgttcttagtaaaagcttacttacctgtaaacgaatcattcggtttcactgctgatttacgttccaacactggaggtcaggccttcccacaatcagtcttcgatcactggcaaatcttacctggtgacccaatggaacccagtaccaaaccctatggaattgtgcaggacacacgtaaaagaaagggtcttaaagaaggacttccagacctggcacaatatctggataaattataaacaactaagaaacttaatttatgtacagattatttaataaaattatttcaatttactcaacggtttttatagttaattgtatttttgatatttttattctgataagttttcagttctctcaaattgatggcaacactagaaatgaaataaactaaataatctgactaatattttatgtttgttatatatatttttgttaacagtccagatatttgtatatttattaatttgacatcaaaagtaaatctgatgaaacatttttgagtatttatttgtggatacaaattcgtcttgttttatttttactcccttgaaacattttattagtgtaatttttatttgagcagtactgattaatgttaagtatattttttggatatgtgtataataaaactcagttttgtaaggaatctagttttctttaatgtgggtatccaaatcaattacgttaagtaaataaaatactatacccaaagttatacaaggttagagagtaaacaataaaacattaaatattctgtacatacattctagactcggataagatgaccgctgaaaataaatgggccctcttgtactactatatctggtacatagtgttactacagaactagaggattttttaaaattgaaggagctaataccacatcagaaaaacacccacatgctttataaaacattaggaaggaaagagtcattacgtataaaaattggagcatactttacagtaaatgaaacaaagaaaccttatctaaacaaatattcacaaagtcctggataaattcattaagatcaatcacattcaatataacagaatttcttcattgttttgaactctttgtagatatctcttggaaacattaatatgctgattggaattctttaattattttatgaaaatattatggttgatttatggcacctgactgatttcagatctccaaatacacattaggaaatcatgatgaagaaaccatttttatttttccatgtagcaaattttctatagaaatattagcttgctaatatccactaactagtagaagtttgtaatgtcacatttatttaaagaaatggcaggatagcaaggattttattttctttaaaaatgataaattgcatacctttgaagaagacaaaatattactcctatacatttcatacaaacaataaaaagaagaaaccacgataccagatgaggaaaaacatggaattcagttcatttagaattgattgttttgaaaagcttaaactaattgatttttgcaagttgacagctgacaaggaatgctcctatacaaactgaaagatcgacgattaggatattttttaaaggttttgtaatgagtaacatattcctaggagtatatcttgagacataatgtgaaagatctaaaatatcctatggggcagattcctgttgtatttaaaaaaagggctgcaaattaatagccactaaagctgactttgctgtttttgaaacaaaaagtctgcgaattaataaccactgaggctgactttgctgttttttaaagaaaaggttgttaattaataaccggtgagactaaccctgatgtttttgaaagaaaggggttgctaattcataatccatggcgcaaactctactgtttttgaaataagagatttttgagaaattgtactgaaaatgtgcctgttcgtattaatatgaactgaaaacaacaaaggcaaatcagggatctaacctaccgatctttaaaaggctgttcccaaaaataaatgattctgatggtttcatggacttaagagtgaaatcaagagaaggtgtctgttcaatatagaaagttttggggatgaaattctttctctctggaatagtttctgttattcaaggtgttaaactaagaatatttcaggataaaa

SEQ ID NO: 49 - DNA, 528 bp, Diabrotica virgifera
  misc_feature (1)..(528): RNAi target sequence
  misc_feature (499)..(499): n can be any nucleotide
  misc_feature (500)..(500): n can be any nucleotide
cgtcaaaagtatttgtcgcatcaactgaagacatgagaaaataattttttacaacataatattttcagatattaaatcaagatggtactagcagatttaggtcgtaaaattacgaccgccttgcagtctttaagcaaggcaacaattattaatgaagaggtcttaaatggaatgctaaatgatatttgtcgggcactcattgaggctgatgttaatatcaaattagttaaatctctcagggaaaatgttaaatctgttattgactttgatgaaatggctggtggtctcaacaagaggaggatgatccaaagtgcagtatttaaagagcttgtcaaattggtagacccaggagtaaagccatatcaacctgttaaaggcaaaccaaatgttattatgtttgttggtttacaaggttctggtaaaacaaccacttgtaccaaactagcttatcattatcagaaaaagaactggaaatcatgtttggtatgtgcagatacanncagagctggtgcctatgatcaggtaaaa

SEQ ID NO: 50 - DNA, 22 bp, Artificial Sequence
  primer
  misc_feature (1)..(22): forward primer
cgtcaaaagtatttgtcgcatc

SEQ ID NO: 51 - DNA, 22 bp, Artificial Sequence
  primer
  misc_feature (1)..(22): reverse primer
ttttacctgatcataggcacca

SEQ ID NO: 52 - DNA, 1927 bp, Diabrotica virgifera
  misc_feature (1)..(1927): WCRW transcript ta05283.001_diavv
ggggggtcgcatcaactgaagacatgagaaaataattttttacaacataatattttcagatattaaatcaagatggtactagcagatttaggtcgtaaaattacgaccgccttgcagtctttaagcaaggcaacaattattaatgaagaggtcttaaatggaatgctaaatgatatttgtcgggcactcattgaggctgatgttaatatcaaattagttaaatctctcagggaaaatgttaaatctgttattgactttgatgaaatggctggtggtctcaacaagaggaggatgatccaaagtgcagtatttaaagagcttgtcaaattggtagacccaggagtaaagccatatcaacctgttaaaggcaaaccaaatgttattatgtttgttggtttacaaggttctggtaaaacaaccacttgtaccaaactagcttatcattatcagaaaaagaactggaaatcatgtttggtatgtgcagatacattcagagctggtgcctacgatcaggtaaaacagaactgtacaaaagctaggatacccttttatggaagttacacagaagttgatcctgtagtcatagcccaggatggtgttgatatgtttaaaaaggaaggttttgaaattataatagtagatacaagtggtagacacaagcaagaagaatctttgtttgaagaaatgttggcagtttctaatgctgtgagaccagacaatattattttcgttatggacgccacaattggtcaagcctgcgaagcccaagcaaaagcctttaaagaaaaagtagatgtaggatccgtaattatcacaaaattggatggtcatgcaaaaggaggtggtgcacttagtgccgttgcagctactaacagtccagttatatttatcggtacaggagagcacatagacgatttagatccatttaaaacaaaacctttcattagtaaattattggggatgggtgacatagaaggtttaattgacaaagtaaacgaattaaagttagaagataatgaagaattgttagaaaaaattaaacatggtcaatttacgctcagagatatgtatgaacaatttcaaaatataatgaagatgggacctttttcacaaattatgggtatgatcccaggatttagccaagattttatgtcaaaaggaagcgaacaggaatcaatggcacgattaaaaagattaatgacaataatggacagtatgaatgattacgagttggacaacagggatggcgcaaaattgtttactaaacaagttggtagagtggtcagggtcgcacaaggatctggtgtaacagaaagagaagtaaaagatctcattacgcagtacacaaaattcgcagcggtggtaaagaaaatgggaggcatcaaaggtctcttcaaaggtggcgatatggctaaaaacgtcaaccacaaccagatggcgaaacttaatcaacaaatggccaaaatgatggaccctagagtcctccaacaaatgggcggcatggcaggtttgcaaaatatgatgagacaactccaagcaggcgcagctggtggtttagggggcttaggtaatcttatggggggctttggtaataaatgattgttaaatattttttatgattattttgaattgccatttgatacttctttcagaagccatatgttgtgtcaagcaacattttttatttgtagaataatctaataattaacgcagactttatcattaccgaagcaaactgctacaatatgtataaagaaagttaatggcatttgaaagaattattgagtgatttgtttctaaatggatgaggaagcagagtatttttgttttgttttgaatgtgtagaaaatattttatattgacattgtaaaaacggtacactgtttgtaacttattcctaaaaataaacagttttctaataaaaaaa

SEQ ID NO: 53 - DNA, 605 bp, Diabrotica virgifera
  misc_feature (1)..(605): RNAi target sequence
aggctgtaagagaacctatgcagtctggaattaaggctgtagattctcttgtaccaattggtcgtggtcagcgtgagttgatcattggtgatcgtcaaactggtaaaactgctttggctattgatacaatcatcaaccaaaaacgattcaacgatgctgaagacgaaaagaagaaattgtactgcatttacgtcgccatcggtcaaaagagatctactgtggctcaaatcttgaagcgtctcacagacactggtgccatcaactacacaatcattgtatcagctactgcatctgatgctgcacctttgcaatacctcgccccatactccggatgtgctatgggtgaatttttcagagataatggcaaacatgccctcatcatctatgatgatttgtccaaacaagccgtagcctaccgtcagatgtctctgttgcttcgtcgtcctccagggcgtgaagcctaccctggtgatgtattctaccttcactcccgtcttttggaacgtgccgccaagatgtctgaagcccacggtggtggttcattgactgccttgcccgtaattgaaacccaagctggtgatgtatcagcctacattccaaccaat

SEQ ID NO: 54 - DNA, 23 bp, Artificial Sequence
  primer
  misc_feature (1)..(23): forward primer
aggctgtaagagaacctatgcag

SEQ ID NO: 55 - DNA, 22 bp, Artificial Sequence
  primer
  misc_feature (1)..(22): reverse primer
attggttggaatgtaggctgat

SEQ ID NO: 56 - DNA, 2003 bp, Diabrotica virgifera
  misc_feature (1)..(2003): WCRW transcript ta00263.005_diavv
ggggggatcgtgcgcagttcggcctattcgggtactcgttcagtgttcgtcacttaattttcagtactggggcgactggcaaaaaaatgtctttgctttccgcacgattagctgcctcattggcaagaaatgcccctaaaaatgtaacacagattgcgggagctgtcttccctgctgcatccgtcgcagcccggaacttccatgctactccacaaaacaaaggtgctgaaatttcatccatccttgaagagcgcatccttggtgctgcaccaaaagccaacctcgatgaaacaggacgagtcttaagtattggtgacggtatcgcccgtgtatatgggttgaacaacatccaagccgatgagatggtggaattctcctccggtctcaaaggtatggcccttaacttggaacctgacaacgttggtgttgtagtatttggtaacgacaaactcattaaggaaggtgacattgtcaagagaactggtgccattgtagatgtgcctgtaggtgaccaaattttgggacgtgtagttgatgccttaggtaacccaattgatggcaaaggaccattgaacaccaaacaacgtttccgtgtaggtatcaaagcccctggtatcattccacgtatctctgtaagagaacctatgcagtctggaattaaggctgtagattctcttgtaccaattggtcgtggtcagcgtgagttgatcattggtgatcgtcaaactggtaaaactgctttggctattgatacaatcatcaaccaaaaacgattcaacgatgctgaagacgaaaagaagaaattgtactgcatttacgtcgccatcggtcaaaagagatctactgtggctcaaatcttgaagcgtctcacagacactggtgccatcaactacacaatcattgtatcagctactgcatctgatgctgcacctttgcaatacctcgccccatactccggatgtgctatgggtgaatttttcagagataatggcaaacatgccctcatcatctatgatgatttgtccaaacaagccgtagcctaccgtcagatgtctctgttgcttcgtcgtcctccagggcgtgaagcctaccctggtgatgtattctaccttcactcccgtcttttggaacgtgccgccaagatgtctgaagcccacggtggtggttcattgactgccttgcccgtaattgaaacccaagctggtgatgtatcagcctacattccaaccaatgtcatttccatcactgatggacaaatcttcttggaaactgaattgttctacaaaggtatcagacctgccattaacgtaggtttgtctgtatccagagtaggatcagctgctcaaaccaaggccatgaaacaggttgctggttccatgaaactggaattggcccaataccgtgaagtagctgcttttgcccaattcggttccgatcttgatgctgctactcagcaattgttgaacagaggtgtacgtcttactgaattgttgaaacaaggtcaatacgtacccatggctattgaagaacaagtagccatcatctactgtggtgtcagaggacatttggacaaagttgatccatcaaagattacagtatttgaaaaacaattctcagaacacattaagactagccacaaaaacatcttgcagagcattgccaaggaaggaaaaatcacagacgatactgatgcccaactcaagaaagtcgttcaagatttcttggccagcttctctggttaaatataaataatacaattattattaatacctaaatcgtcacttttgttgatgtgatctgtaaacgtttaagaacttcatgagctgtaatcctttcaaattagaataattaggcaggactcctatgttatccaataaggcacgtgaaagaattttcttttctccattttacaatatttatcgatcattgttttttaaggatatcttatttgtaaaaataaaaaataaactttatattttttaaaaaaaaaaaaaaaaaatcgg

SEQ ID NO: 57 - DNA, 583 bp, Diabrotica virgifera
  misc_feature (1)..(583): RNAi target sequence
gcacgaggctttattagacagaggtattcatcccataaggattgctgatggtttcgagctagcttgtcaaacagctgtagctcatttggaaaaaattgcagaactatttccggtatcagcagaaaacactgaaccattaataaaagttgcaatgaccactctgggatctaaaatcattaacaagtgtcataaacagatggcagaaatagctgttaatgcagtcttagctgttgcagatttagaacagaaagatgttaattttgaacttattaaagttgaaggcaaggttggtggaaaattggaagacacaacattagttaaaggtgtagttattgacaaaacaatgtcccatccacaaatgcccaaagaactaaaagatgtaaaattggctattctcacctgcccgttcgaaccaccaaaaccaaagaccaaacataagttggatgtcagcagtgtggaagattataaggaactaagacagtatgaacaagaaaagttcaaagaaatcgttggtttggtaaagaaagctggagctacattagcaatttgtcaatggggcttcgatgatgaagccaatcactta

SEQ ID NO: 58 - DNA, 23 bp, Artificial Sequence
  primer
  misc_feature (1)..(23): forward primer
gcacgaggctttattagacagag

SEQ ID NO: 59 - DNA, 22 bp, Artificial Sequence
  primer
  misc_feature (1)..(22): reverse primer
taagtgattggcttcatcatcg

SEQ ID NO: 60 - DNA, 1889 bp, Diabrotica virgifera
  misc_feature (1)..(1889): WCRW transcript ta05506.001_diavv
aaaaatatcaaatgtcagttttctgtcactttcatgggagtagccagttcgaaacaaaaataaaattttaattaatctggaacatctcccaattttttagaaaacttacattttcaatatgagtgctataccaggaagtattgcatttgatgaatatggacgacccttcataattcttagagaccaagataagcaaaagaggttgaccgggatagatgcacttaagtcacatattttggcagcgagacaaatcgctcaaactataagcacttctttgggtcccaaaggtttagacaagatgatggtgtcacctgacggtgaagtaacagtcactaatgatggtgctactattttgaaaatgatggatgttgaacatgaagtcgctaaattgctagtacagctatcacagtcccaagatgatgaaattggtgatggtaccacaggtgttgtagttttggctggtgccctgttagagcaagcaggatctttattagacagaggtattcatcccataaggattgctgatggttttgagctagcttgtcaaacagctgtagctcatttggaaaaaattgcagaactatttccagtatcagcagaaaacactgaaccattaataaaagttgcaatgaccactctgggatctaaaatcattaacaagtgtcataaacagatggcagaaatagctgttaatgcagtcttagctgttgcagatttagaacagaaagatgttaattttgaacttattaaagttgaaggcaaggttggtggaaaattggaagacacaacattagttaaaggtgtagttattgacaaaacaatgtcccatccacaaatgcccaaagaactaaaagatgtaaaattggctattctcacctgcccgttcgaaccaccaaaaccaaagaccaaacataagttggatgtcagcagtgtggaagattataaggaactaagacagtatgaacaagaaaagttcaaagaaatcgttggtttggtaaagaaagctggagctacattagcaatttgtcaatggggcttcgatgatgaagccaatcacttattgttacaacaagaattaccagctgtaagatgggttggaggtccagaaattgaacttatagcaatagctactgggggtaggatagttccccgttttgaagagcttactcctgaaaaacttggtcatgctggtttggtacgagaaattgcatttggcaccactaaggatagaatgttggttattgaagaatgttcaaattcacgggcagttacgattcttgtcagaggaggtaatcaaatgttagtagctgaagccaagagaagtctccatgatgcattatgtgttgtcaggagtttagttcaagaaccaagagtagtgtatggtggtggagcagcagaaattgcctgctgtttggcagtcgcggctcaagcagatcaactagcttccttggaacagtacgcctatcgtgcatttgctgaagccttagaaagtataccacttgctttggctgataacagtgggctatctgcgatccatacgctaggagaagtcaaggctaaacaagcagctacaggagatccagctctcggtatcgattgtatgaatactggaaacctcaacatgagagaacaacatgttatcgaatcactcagatcaaaaagacaacaatttttgttggccacccagttggttaaaatgatattgaaaattgacgatgtacgccaacctgcatcgggataaaatgacacttatttttgtactaccggcgttaatttctaattctcactaataatgacttttataagttgatctgcgtaatgcttctttgttcttataatcactgaaagtattaatataatttatagaaaaaaaaaaaaaaaaaatgcga

SEQ ID NO: 61 - DNA, 588 bp, Diabrotica virgifera
  misc_feature (1)..(588): RNAi target sequence
agagaacagtcagcacaagcagttattgatatcgatgatttagataatttggctacacctgaaagtatattgttgagtgctgtttctggagaagatgcccaagaccgttcagatcgtacaattcttactccgtgggttaagttcctttgggaatcttactgtcaatgtttggaacttttgcgtactaatgcacatgttgagaacttatatcatgatatagccaggatggctttccagttttgtttgaaatataatagaaaaacagaatttagaaaattatgtgataaattgaggaaacatttagaggatatctgcaaattaccaacacaaatggcaaatgtttctatgtctaaaccagaaacccaacaacttaatcttgaaacgaggctccatcaactagattttgctattcagatggagttatggcaagaagcctacaaggccatcgaagacatccataacttgatgaatttgtccaagaagagtccagtaccaaaaaccatggcaaactattaccagaaactagccatggtgttctggaaagctggtaattatctattccatgctgctgctttgttcaagttcttc

SEQ ID NO: 62 - DNA, 22 bp, Artificial Sequence
  primer
  misc_feature (1)..(22): forward primer
agagaacagtcagcacaagcag

SEQ ID NO: 63 - DNA, 22 bp, Artificial Sequence
  primer
  misc_feature (1)..(22): reverse primer
gaagaacttgaacaaagcagca

SEQ ID NO: 64 - DNA, 3733 bp, Diabrotica virgifera
  misc_feature (1)..(3733): WCRW transcript ta05000.002_diavv
attttgtctttcaactgacgtttgctttgacgaaatttcagaagataatagttttatttactattctatatatttaaatgtgaagtgaatacaacaaataaacacagtaaagatggcccgatacggtcagcgtccggaaaacgctttaaagcgagcgaatgaattcatcgaagttggaaaaccagctagagcccttgatactctccaagaagtttttcgtaataaaaaatgggcgtacaattggtcagaatccgttttggaacctattatgttcaaatatctggatctatgtgtagaactgaaaaaatctcacattgccaaggaaggtcttttccaatacaggaacatgttccagtcagtgaatgtaggatcacttgaaaatgttataagagggtatttgcggatggcagaagaaagaacagagaatgctagagaacagtcagcacaagcagttattgatatcgatgatttagataatttggctacacctgaaagtatattgttgagtgctgtttctggagaagatgcccaagaccgttcagatcgtacaattcttactccgtgggttaagttcctttgggaatcttactgtcaatgtttggaacttttgcgtacaaatgcacatgttgagaacttgtatcatgatatagccaggatggctttccagttttgtttgaaatataatagaaaaacagaatttagaaaattatgtgataaattgaggaaacatttagaggatatctgcaaattaccaacacaaatggcaaatgtttctatgtctaaaccagaaacccaacaacttaatcttgaaacgaggctccatcaactagattttgctattcagatggagttatggcaagaagcctacaaggccatcgaagacatccataacttgatgaatttgtccaagaagagtccagtaccaaaaaccatggcaaactattaccagaaactagccatggtgttctggaaagctggtaattatctattccatgctgctgctttgttcaagttcttccagttgtcaaaggagatgaagaagaacatcactccagaggaattacaaagaatggcctgtagggtattaatcgctacactagcaataccgttgccttccgctcaccctgagtttgatagattcattgaaaccgacaagtcacctttagagaaggctcagcgtttagctgttttattggggctgattcaaccacctactagagctagtcttttgagagatcttgtaagagttaatgttgtgaacctggcaagtccacaactacaagatttgtacaattggctggaagtggagttccatcctttactattgtgtcagagagtgcatgaggtaatcaaatctctcgaatctgaagaaaatgcagccctccaacaatatgtgccagctttacaagatgtaactctggtgcgtctagtgagacagatagcacaagtctatcagaccatagaatttgctaggttgatccagattgccaaatttactacaccttttcatctggagagacttttggttgattgtgtgagacacaatgatatgcaaattcgtattgatcatggcaaagactgtatccactttggaatggacctgagtgaaagccaaagagaggacaaaccagagggacccactttgcaagttatgcctagtgagcaagtcagaaatcaacttattaacatgtctactgtattgaatcaagccatacaagtcattaatcctaataagaagaagcttgaacgcgaaaaacttagagctgttatggttcagaattatcacgaaacaaaggttagagaacaccagaaaattttacaaaggcacaagattattgaggacagaaaggaatatattgagcgtttgaatacagtcagggaagaagaggagcagaaaagattggaagaaatgcaacggcagcacttactggccgaacaaaaacgattggaccaagaaagagaagaaagagagcggaaacgtgctctaaatgaaatccagcaggttaaagacagacacttaaaggaaaaactacaacaaatcagacagactggtcatggtcagaagattctgaagaaaatggatgaagacgatatcaaaaagcttgatgcagaccaaatagcggtgaaagaagcagaagagctacaaaaggaacgtcgcgaacttcaagccaagcttaaatctcaagaaaagaaggtagactatttcgagcgtgccaagcggttggaagaaatccctctacttcaagccaatatgcaagaacgtcaattacaggatcagaacttctgggagcaacaggagaaagagcgaatcgctgcagcaattgaagagcgcaagctggccgtcgcaacgagagaccgtttgctacgcatgaaagtcgacaaagatgaattcatctcgaaattaaagaaggagagaaacattgtctacgaagacaatcttaaggaattcgagaagatgttgagcgaggaaagaaagaagaggcttttggaaagaaagatccaaagaaaagaggagcgccgtgctacatatattaaagagaaggaagaagaagccgaacgtagagccaacgaaaagagacgtcgcgaagaagaagaaagggagagattagaggaaatagcgagaaaagaacaggagcaacaagaacgcgcactaaaggaggaacaagaaaggaagaagaaggaacatcaagagagtttggatagagcttggacaatgcagaaagctaaagaggaagaaatcgaaaagaaattagcaatggagaaagaaagcagcgacaaaggaaaagattcttggaggaaagaccccaagaatagctcttcttggaggagggacgagaaacctgctgacgaacccaaaaatgaaccttggagagcatctcgtttccgatcaaatgctgaagaacccccaaaaggcgacaacaccactacttcttcttggaggaatgacgataaaagggaagatcgcagagacgatcgccaaggtgaacgtcgcggcggagacggcggaagatttggcaaccgcgacagcggaagatttggcgacagagacagagaaggtggtgtcagattcacgagagataatcgggataatcgtggggatcgcagggacgatagggagaggagagacgacagggataacagggataggagagacgacagagatcgtagagatgatagggataggagagacgacagggagcgtagagatgatagagagagaagagatgaccgtggcggaagagatgataaccgggaccgccgagacgatcgtgatcgtagagacgacagggaccgaagaggcggggacgaaggtacttggcgtagaaagactgacgatgaccgtcgttctactcctatgagaagagaagctgctccagaatcagcatggaggagtgctaaccgagagaccgatcgtagagatgattctaagagagacgatagaaggggaactccgatgaccagagaaaaaccagcagctcgcgagcagcaatctcagccagaaggcgaggagggctggtcccaagttggaaggagacgttaagccattatataatctagactagagaattaagttacacaattataccgatattttatttacctacaggttacgagggttttcatttatagtaatcattgttttaatgcggaactggcttgaactcgttgataaggcagtgctgtgtgctaattaacccatatagttaataaaatttcagatattataaaaaaa

SEQ ID NO: 65 - DNA, 716 bp, Diabrotica virgifera
  misc_feature (1)..(716): RNAi target sequence
ttgaaaaagatagggctccaaagtcctattgccaacaaaaaaacaacgcaagacattaaacaacttttttcaagcccatctgtatttaaaaaaacagtgcaaaatgtttctgtgggactggtttacgggaatgctgggatatctaggattgtggaagaaacctggaaaactattattcttaggactggataacgcaggcaaaactacccttctacatatgctcaaggatgacagactggcccagcatcttcccacgttacatcccacatcagaggagctttccattggtaacatgaggtttacgacgttcgatttggggggccacgagcaggctaggagagtgtggagggactactttccagcagtcgatgccatagtgttccttgttgatgccaacgacagctcaagatttgtagaaagccaggaacagctaaatgccctcctctcagacgaaactctatcaaactgtccaatacttatcttaggtaataaaattgatctcccaggtgctgcttcggaagatgaattacgaactagattcggcttgtttggccaaaccacaggcaaaggcaaagtagccagaaatgatctacccggtaggcctctagaactatttatgtgctctatactcaaaagacaaggttatggagaaggtttccgttggttggcacaatatatcgattaattatgtatttttccatttcgttctgtcattg

SEQ ID NO: 66 - DNA, 22 bp, Artificial Sequence
  primer
  misc_feature (1)..(22): forward primer
ttgaaaaagatagggctccaaa

SEQ ID NO: 67 - DNA, 22 bp, Artificial Sequence
  primer
  misc_feature (1)..(22): reverse primer
caatgacagaacgaaatggaaa

SEQ ID NO: 68 - DNA, 2438 bp, Diabrotica virgifera
  misc_feature (1)..(2438): WCRW transcript ta00303.001_diavv
ggggggaaaaagatagggctccaaagtcctattgccaacaaaaaaacaacgcaagacattaaacaacttttttcaagcccatctgtatttaaaaaaacagtgcaaaatgtttctgtgggactggtttacgggaatgctgggatatctaggattgtggaagaaatctggaaaactattattcttaggactggataacgcaggcaaaactacccttctacatatgctcaaggatgacagactggcccagcatcttcccacgttacatcccacatcagaggagctttccattggtaacatgaggtttacgacgttcgatttggggggccacgagcaggctaggagagtgtggagggactactttccagcagtcgatgccatagtgttccttgttgatgccaacgacagctcaagatttgtagaaagccaggaacagctaaatgccctcctctcagacgaaactctatcaaactgtccaatacttatcttaggtaataaaattgatctcccaggtgctgcttcggaagatgaattacgaactagattcggcttgtttggccaaaccacaggcaaaggcaaagtagccagaaatgatctacccggtaggcctctagaactatttatgtgctctatactcaaaagacaaggttatggagaaggtttccgttggttggcacaatatatcgattaattatgtatttttccatttcgttctgtcattgagttaggatattaatgtttgaggaactattggcaacactgcaactacctgattcatttcagatcttaggtactttacataaatatctaaatatagatgttggcaatgtaattttgaacaacagtatatacattcaatgtaaattatatatttttagttaagttaccttcttaaatggtgtttgagtggctatggtactgaaatagtttgactttttgtgttcttcgataactaaaaatgatttcttgtggaaagttacactcagaattacatagttaacttctttatcagcagttgttgtcaagatttccattttgagacgattgttttgtaaattaggtgggaatttttaaaatgttggactgttttttaacatgcctttctcaacttttgttacaaataatgttttgtccagttgtaaatgttttatttaactagagactttctaggttgtgttaataatagtcattggtcaaatacgatagaagccaaaatttgaagaaaaggaacaatgtactagggtggtccgataagtattttgccttcaaaagaaaagtggcgatttatttttcaatattgtctccttctagctcaatacacgtgacccagcgaggcttcacccagattcagcggcttcaatttctgaaggtctgtaaagtagacatcaatagcagcgatgaactcactaaatcgacttacatttctgcccgacgagtgacttttcaaatttggaaacgaaaagaaatcgcacagggccaaatctggagaatacagtggatgggatagtagttagtagtccgaatcgaaaaatttggccatggcgacggcgaaggtgtgagcgggtgcgttgtcgtggaagagtactttttatcttccccaattggggctgttttttctgcaagtcggtgtcgaatcgacccaataattcgccaaagtaaagccctgtgaccgttttgccctttttttcaggaagctgatatatatcacactttgtgaatcccagaaaacggtggtcatcacttttcggtcgttaggacagtctttgccttcttcggagtatgttcgcggggcgacgtccactgtatcaactgttccttggtttctggtgagtactggtggatccaagtttcatcgatgattatgaaacaatgtataaacaataggaaggtttaatttatttctaattctgagtaggaatggtcacttaaaggttttgtaatttaacttaagtacctaatgaatttattttggactttttcaagcttggctatatggacttcataagcgggtgaccaaacaactgagcaatactcaagaacagatctaactagggaaatgtaaatcagtctgattgaattaatgttatgcaaacatctagaagttctaataatgaagcctaacatgtgaaatgccgcaccaaccacatcaacacaatgcgcataaacaaaataatgaagaatataactcaaaaaacagatacagcacaggtgacacaacacacagcagtcaagcacaaagtgaaagcacaaaaaactacaaaaccaaaaaacaagaacaaaatcacaggcaaatatcaaacgaagtgaattattcaacaaaccaaaaataaaccaaatgccacacccagtcaaaacaaaacaacgaaggttgagattttgacatagataggccatctacaagaatgtattacatatacagggtgcgccaagcctctggtttt

SEQ ID NO: 69 - DNA, 619 bp, Diabrotica virgifera
  misc_feature (1)..(619): RNAi target sequence
tcggtcgatttaggtagtaggtgtaataaattttgaaagtgataaagacagtttgtgataaactgtagtgcagttcttttcgtttattttctcacctctcacataacaattaaactgaaacaatggcccccccgggtatcgggaattcggtggagatccgccccgaggcgacagcatcgtcggcagagaggagcagtagcaacggagtcgctacattccaaaaggacatcgtcgttttggatgggggcttcgctactcaattaggctgccacgtccaacaaccgattgatggagacgtcctatggagttccaggttcttggccaccaatccagaggctgttattgatactcacttagattttctcagagctggtgcggatgtaattattactaacacatatcaagcagatgtcaacttgtttgccaaacatctcaatatgaccaaagaagaaggatacaacttaataaaagactcagtgaagatggccaaaacagctgttgaaagatatttaaaagaatatccggaagcaagaaaacctcttatagctggttcagtgggtccttacggagcttcactacatgatggttcggaatacacaggagcctatgcgaaaactac

SEQ ID NO: 70 - DNA, 23 bp, Artificial Sequence
  primer
  misc_feature (1)..(23): forward primer
tcggtcgatttaggtagtaggtg

SEQ ID NO: 71 - DNA, 22 bp, Artificial Sequence
  primer
  misc_feature (1)..(22): reverse primer
gtagttttcgcataggctcctg

SEQ ID NO: 72 - DNA, 1246 bp, Diabrotica virgifera
  misc_feature (1)..(1246): WCRW transcript ta08045.004_diavv
ggtcactcgtcgccgactgccgacttgatcggtcgatttaggtagtaggtgtaataaattttgaaagtgataaagacagtttgtgataaactgtagtgcagttcttttcgtttattttctcacctctcacataacaattaaactgaaacaatggcccccccgggtatcgggaattcggtggagatccgccccgaggcgacagcatcgtcggcagagaggagcagtagcaacggagtcgctacattccaaaaggacatcgtcgttttggatgggggcttcgctactcaattaggctgccacgtccaacaaccgattgatggagacgtcctatggagttccaggttcttggccaccaatccagaggctgttattgatactcacttagattttctcagagctggtgcggatgtaattattactaacacatatcaagcagatgtcaacttgtttgccaaacatctcaatatgaccaaagaagaaggatacaacttaataaaagactcagtgaagatggccaaaacagctgttgaaagatatttaaaagaatatccggaagcaagaaaacctcttatagctggttcagtgggtccttacggagcttcactacatgatggttcggaatacacaggagcctatgcgaaaactacttcggcagaaaccatgagagaatggcacgggcccagaataaaagccttggtggaaggaggagttgatctcttagcaattgaaactattccgaatgcagttgaagctgagatgttggtccagttaataaaagaagaatatcctaatgttaaagcgtggcttgcttttagtgtagcgcaagacggaaaatcaatagcctacggagaagacttcaaaacaatcgcccgaaaatgttatgactccaatcctgagcaattagtagccataggaatcaactgcacggccccacgactaatcgaaccccttctcaccgggataaatgatgatagaaaagacaacccccgaccacttattgtctaccctaacagcggagaaagttacaatgtcgaactcggggatgattccagatggcataaccgagaaaactgcgagccagtagacacaaatattcacaaatggttagatctgggagtcacgtgggtcggaggctgctgtagaacctacgccgtggatgtcacaagaatacgcgaccaagtgcagttatggaaggagaaacagtagctaaactttgaatttatattttaatttttatttttaataa

SEQ ID NO: 73 - DNA, 680 bp, Diabrotica virgifera
  misc_feature (1)..(680): RNAi target sequence
attgtcaacctggaaaacgacttgtcgaagtcgcatagtttttataagtttaaataaactaaattaaatataaatacttcgagaatgcaataattattattctttaactagacccacagcttattaattagcagaagtagtagcagacttatactaactagcataaggagaaacatattaacatagcatggcagacttcatagattctgaagcagaagaaagtagtgaggaggaggaattagatcatagggatcgtaaaaaagcccaaaaagccaaagttgtagatagttcagatgaagatgatgaagatgatgacgaaagactgagagaggaattaaaggatttgattgatgataatcctattgaagaaagtgatgctgagtctgatgcttcaggaagggaaaaacgtaagaaatctgacgacgaggatttggatgatcgactggaagatgaagattatgatttgcttgaagaaaatttgggtgttaaagttgaaagaaggaaattcaagcgactgcggcgttttgaagatgaagaaagtgaaggagaagaagaacatgatcctgaacaagatagggaacaaattgctatggatatattttcagatgatgacgatgaaagacgatcagaacgaagtcacaggcctgccgtcgaacaagaaacttatggtgtaggcgagg

SEQ ID NO: 74 - DNA, 22 bp, Artificial Sequence
  primer
  misc_feature (1)..(22): forward primer
attgtcaacctggaaaacgact

SEQ ID NO: 75 - DNA, 22 bp, Artificial Sequence
  primer
  misc_feature (1)..(22): reverse primer
cctcgcctacaccataagtttc

SEQ ID NO: 76 - DNA, 6054 bp, Diabrotica virgifera
  misc_feature (1)..(6054): WCRW transcript ta02840.001_diavv
agtttaaataaactaaattaaatataaatacttcgagaatgcaataattattattctttaactagacccacagcttattaattagcagaagtagtagcagacttatactaactagcataaggagaaacatattaacataacatggcagacttcatagattctgaagcagaagaaagtagtgaggaggaggaattagatcatagggatcgtaaaaaagcccaaaaagccaaagttgtagatagttcagatgaagatgatgaagatgatgacgaaagactgagagaggaattaaaggatttgattgatgataatcctattgaagaaagtgatgctgagtctgatgcttcaggaagggaaaaacgtaagaaatctgacgacgaggatttggatgatcgactggaagatgaagattatgatttgcttgaagaaaatttgggtgttaaagttgaaagaaggaaattcaagcgactgcggcgttttgaagatgaagaaagtgaaggagaagaagaacatgatcctgaacaagatagggaacaaattgctatggatatattttcagatgatgacgatgaaagacgatcagaacgaagtcacagacctgccgtcgaacaagaaacttatggtgtaggcgaggaagaagaggaaggggagtactcggatgccgatgattttatagttgacgatgacggtagaccgatagctgaaaaaaaaaaaaaaaaaaaaaaaaaaaaaacagatgccgctctccaagaggctcaagaaaccttcggtgtcgattttgattatgatgaatttagtaaatacgatgaagatgattacgaagatgaagaggaggaggatgacgaatacgaggaagatgatgtagagaaaaggaaacggcctaaaaagacttcaaagaaaaaaccgacgaagaaatccatttttgaagtgtatgaacctagtgaacttaaaagagggttctttaccgatctcgataatgaaatccgaaacactgatattcccgaaagaatgcaacttcgtgatgttccaatcaccgctgttccggatgactcaactgaacttgatgatgaagcagaatggatttacaggcaagcgttttgtaacagaactgtttccaatgtggattctcatttatcatcagaggcaagagagaaattaaagaagactcatcatgccatcggaaaaatcagaaaagcattagattttataagaaatcaacaattagaagtaccgtttattgctttttatagaaaggagtatgttcaaccggaacttaatattaacgatttgtggaaagtatataaatacgatgcaaagtggtgccaattgaaaacacgcaaagaaaacctcttgaagctttttgaaaaaatgaggtcatatcaaactgaccacataatgaaagatccagatgcaccaattccagacaaccttcgtatcatgactgagtccgacattgagcgattgaaaaatgttcaaaccgccgaagagttaaatgacgttcacaatcatttcattttatattatgctgcagatttgccagccatgcatgccgcgtggagagtcaaagaaagagaaaggagaagacaggaaagaaaggaggctagacttaagctcatcgctgaaagtgaagaaggtgctgaaattcctgaagagcctgaggaaattgacgatgatgaaccagaagctgaaaccttaaaatacgccaatagatcaggcagctatgcactatgtaataaaggaggtttgggtcctctagcgaagaaatttggtttaacgcctgaagaatttgccgaaaacctgagagataattatcagaggcacgaagtagatcaagaacatatagaacctgtagaagtcgctaaagaattcgtatcgccgaaatttcctacagtggaagaagtgttgcaagctactaaacacatggtagctttacaaatagcaagagaaccattagtaaggaaatgcgtaagagaaattttctttgaacgagctagattaaacgtttatccaaccaaaaagggtgtgaaagttatagatgaagctcataattgctatagtatgaagtatgtaaaaaataaaccagtaagagatcttgcaggcgaccaatttttaaaattatgtttagccgaagaggagaacctccttactattaccatcaatgaccatattcaaggaaacactactaacaattacattgatgaagtcaaacaattatatataaaggatgaattcagcaaacacgttcaggattggaatgcgctaagaatggaatcggtagaaagggctttaacgaaaagtgtcttaccagatttaagatctgaattaaaacgaacgttgctcacagaggctaaagaattcgtattaaaagcttgctgtagaaaattatataattggataaagattgctccatacgcaataacttttcccgatgaagacgaagatgattgggatacatccaaaggtgttagaactatgggtgtagcatacgtaccagagcacacagtatcagcttttacctgtatttcagcaccagacggagatataactgattatctcagattaccaaatattctaaaaagaaaaaatagctttcgaactgaagaaaaacttatgaaggaagctgatcttcaagcactgaaaaatttcatattccttaaaaagcctcatgtgatagcagtagggggtgagtccagagaagccttaatgatcgctgatgatatcagaggagtaataagtgaactaatagaatccgaccaattcccacagattagggttgaaattattgataatgaattagccaaagtgtacgcaaattccattaaaggttcaactgatttcagagattatccagagttgttaaggcaagctatttcattagctcgaagaatgcaagatcctttggttgaattttcccaattatgtaatagcgatgaggaaattttgagtctgaggtttcatcccttgcaggaacaagtccagaaagaagaactactagaagctctctgtttagaatttgtcaacagaacaaatgaagtaggtgtagatataaatcttgccgttcagcagattcataaaaagtagtttagttcaattcatatgcggtctaggaccgcgtaaaggtcaagcgttacttaaagttctgaaacaaactaatcagaggcttgaaaacagaacccaattggttacattttgtcatatgggtccaaaagtttttattaattgttctggattcataaagattgataccaatagtttaggagacagtactgaggcatatgttgaaatattggatggctctcgagttcatcccgaaacttatgaatgggcacgaaaaatggctgtggatgctttagaatatgacgatgatgagggagctaatccggcgggagctttagaggaaattctcgaggcgccagagaggttaaaagatcttgacttggatgcatttgcggaggaattggaaagacaaggaatttggtaacaagagtataacattgtatgacattagagcagaactgaactcgcgatataaagatttgagacaaccttttcgttctgcaaatcctgaagaactattcgatatgcttactaaagaaactcccgaaacattttatattggaaaaatggttacatctaccgtgtttggcattgcaaggagaaaaccaaagtcagaccagctcgatcaagctaatccggtccgtaatgacgaaactggtttgtggcagtgccccttctgtttgaaaaatgattttcctgaattatctgatgtatggaatcattttgatgcaggagcatgtcctggtcaagctactggagttaaactaagactggataatggtatattaggttatatttatataaaaaatataagcgacaaaccagttgctaatccggaagaaagagtaggcataggacaattaattcactgtagaataataaaaattgacgtagagaagtttagtgttgattgtacatcgaaatctagcgatcttgctgataaaaatcatgaatggagacctcaacgagatcctcattatgatcaagaacgtgaagacaaagacaatcgattagaagccgagaagaagaaagagaaacagcgtatgacgtacatcaagagggttatcgttcatccggcgttccataacatatcctatgccgaagccgaaaaatgtatggttaatatggaccagggtgaagttatcattaggccttcgaggaagggcccggaacaatcgaacataacgaagaaggttaaggaaggaacatatcaacacaaagatactaaagaaaaacgaaaactgaacaatggtacattaggaaaatcattatggattggaaatgaagaatttgaagatcttgatgaaataatagctaggcacgttacaccaatggcggcgcatgctagagatttactgtattttaggtattacaaagatttccaaggtggtcataaagataaggctgaggaatatctaaaagatgaaaaaaagaaaaatgcttctaaaattcattatgtagttagtgctgctaagaatatacctggtaaatttcttctttcgtaccttccacgcaacaaagttagacacgaatatgtaacagttactccagaaggctttcggtttagacaacaaatgtttgattccgtttcttcgttatttaaatggttcaaagaacatttccgggagcctccaccaggcggtgcaacaccaggtagcacgccaaggatggcttcaagcagaactggatatggaagtgccacacccgcgtatagtatgaataatgaagctattcaaagagttgctcaaaatttaccaagtcatgtagttcaagcgttatctgctgccaccaaccaaactccacattatccccacacccctggttatggaggcaattatattaatacgccttacactccaagtggtcaaactccatacatgactccgtacgctacaccccatacgcagcaaactccccgctatggtcatcaaacaccttcccaacacatggcgagctcagcaccacaaggtctcaacaatccctttttacatcctggcgcggtgactccctcccaacgaactcctatttatcgcaaccatcctgcacaatctccagtaatgcttcctacaagccctgtaccaagtccaggttcccagagttcatacagtagtcatttaagtcataatcagcgaagtggaagttatgctgaatccttaagattccaacctcccgaatcgccgagaagctcagtgagtaatagaagctttcaaactgatagatacggcggtgataggtatggtaaaggaggaagtcatagatatggtggaagctcaaacgaagatagatatggtaagggaggaggaggaaatgaaaatacggattggcagaaagctgcagaagcatgggctcgatctagatctactccgagaagtgatggccgtaatactccaagatctgtaggtcaacgaactcctagatacgacaacgacgccgaacgttctagaatgaaacacctcagcaagagcccgaggtctgttaggtctactcctcgaaccaatacatctccacattctatgtccctaggtgatgctacccctctgtatgacgaaagtatctaaattactttgtatttggttatatagtagggtaacagtgatattgtaaatgctaaaatcaacaatacagattcgcgatattaagtcacaatgacgacctctcgtgtatttcggctgaactagcatcgaggggtcttttcaatgtcaaacgctgagcgcacatgcatttgaaacaagtaggcaatattcacttatttatttttacatgttttaaattaattattgggtaatataaaatgattaacatggaatcttcacgtttcaataaaagttggcgtcgatattgtatataaaattaaaaaaaatatgtaaaaataaataatattacctacttgtctcaaatgcacgtgcgcccagcgtttgacattgaaatcaccctcaaagctagttcagacgaaatagacgagaggtcgtcgttgtgacttaacatcgtgaatagaaa

SEQ ID NO: 77 - DNA, 319 bp, Diabrotica virgifera
  misc_feature (1)..(319): RNAi target sequence
tggtaagggaggcaaagttaagggaaaagcaaagtcccgatcaaatcgtgctggtttacaatttcctgtaggtcgtattcatcgtttattgagaaaaggaaattatgccgaaagagttggtgctggagctcctgtatacttggcagctgttatggaatatttagctgctgaagttttggaattggcaggaaatgcagctagagatagcaaaaagacccgtataattcctagacatttacaattggccataagaaatgacgaggaattgaacaaattactgtcaggagttaccatcgcccaaggtggagtattgcctaat

SEQ ID NO: 78 - DNA, 22 bp, Artificial Sequence
  primer
  misc_feature (1)..(22): forward primer
tggtaagggaggcaaagttaag

SEQ ID NO: 79 - DNA, 22 bp, Artificial Sequence
  primer
  misc_feature (1)..(22): reverse primer
attaggcaatactccaccttgg

SEQ ID NO: 80 - DNA, 456 bp, Diabrotica virgifera
  misc_feature (1)..(456): WCRW transcript ta07804.001_diavv
gggggaagggaggggagtattcacttgatcttcaaggtagattaacgcaagtagaaatctaaaacatgtctggacgtggtaagggaggcaaagttaagggaaaagcaaagtcccgatcaaatcgtgctggtttacaatttcctgtaggtcgtattcatcgtttattgagaaaaggaaattatgccgaaagagttggtgctggagctcctgtatacttggcagctgttatggaatatttagctgctgaagttttggaattggcaggaaatgcagctagagataacaaaaagacccgtataattcctagacatttacaattggccataagaaatgacgaggaattgaacaaattactgtcaggagttaccatcgcccaaggtggagtattgcctaatatacaagcagtacttttacctaaaaagaccgaaaaaaaaaaaaaaaaaaaaaaaaaaaaaa

SEQ ID NO: 81 - DNA, 759 bp, Diabrotica virgifera
  misc_feature (1)..(759): RNAi target sequence
atcatcctctgtgtttccgttttgaacttaacttgtatttagtttaaaaaataatcatgtctagaggaagcagtgcaggttttgaccgacacataacaattttctcgcccgaaggccgactctatcaagtagagtatgcttttaaagccattaaccaagccggccccacttcggtagcagtccgaggagtagatgctgcggcgtgtgtgacccagagaaagatcccggataagctgattgatcccaacacaattacacatctgttccagttaacagaacacactggatgtgtgatgactggcatgattgctgacagcaagtcccaggtgcagagagctagatatgaggctgccgagttcaaatataagtttggatatgagatgccaatcgatgccttgtgtaggagagtatcggatatttcccaggtttatacgcagaatgctgagatgagacctttgggttgctccatgcttctgataggatatgaccaagaaatgggaccatgtgtccacaaagctgaccctgctggctattactgtggctacagagcagtaagtgtaggatccaaacaaactgaagccaacagctacctagagaagaagctaaagaagaaaactgatctgtccaaagatgaagtcatccaattggcaatcagttgtctttcaagtgttttatctgtagattttaaaccaacagaagtcgaagttggggttgttactaaggatgagcccaagtttaggaaattgacggaacaagaaa

SEQ ID NO: 82 - DNA, 22 bp, Artificial Sequence
  primer
  misc_feature (1)..(22): forward primer
atcatcctctgtgtttccgttt

SEQ ID NO: 83 - DNA, 22 bp, Artificial Sequence
  primer
  misc_feature (1)..(22): reverse primer
tttcttgttccgtcaatttcct

SEQ ID NO: 84 - DNA, 957 bp, Diabrotica virgifera
  misc_feature (1)..(957): WCRW transcript ta04410.001
ggggccccgggggacagaagacagaacgtgacaacagaaaaatatagaaaatcatcctctgtgtttccgttttgaacttaacttgtatttagtttaaaaaataatcatgtctagaggaagcagtgcaggttttgaccgacacataacaattttctcgcccgaaggccgactctatcaagtagagtatgcttttaaagccattaaccaagccggccccacttcggtagcagtccgaggagtagatgctgcggcgtgtgtgacccagagaaagatcccggataagctgattgatcccaacacaattacacatctgttccagttaacagaacacactggatgtgtgatgactggcatgattgctgacagcaagtcccaggtgcagagagctagatatgaggctgccgagttcaaatataagtttggatatgagatgccaatcgatgccttgtgtaggagagtatcggatatttcccaggtttatacgcagaatgctgagatgagacctttgggttgctccatgcttctgataggatatgaccaagaaatgggaccatgtgtctacaaagctgaccctgctggctattactgtggctacagagcagtaagtgtaggatccaaacaaactgaagccaacagctacctagagaagaagctaaagaagaaaactgatctgtccaaagatgaagtcatccaattggcaatcagttgtctttcaagtgttttatctgtagattttaaaccaacagaagtcgaagttggggttgttactaaggatgagcccaagtttaggaaattgacggaacaagaaatagatttccatctgacagctattgctgagagggattagatagattttttatattcactctttgtaatgttaagaaatggtcaaattttgagttaagtaagaaataaatttttctcttataaaaaaaaaaaaaaaaaaaaaaaaaaaaa

SEQ ID NO: 85 - DNA, 587 bp, Diabrotica virgifera
  misc_feature (1)..(587): RNAi target sequence
aactttgtgtgttttggcaggtccgatggctgcaataagaaaaaaattggtgattgttggtgacggagcatgtggaaaaacatgtcttttaatagtatttagtaaagatcagttcccagaagtatacgtgcccactgtattcgaaaactatgtggcggatattgaagtagatggaaagcaggtagaactcgccttatgggataccgcaggtcaagaagattatgatcgtctgcggcccctttcatatccagacaccgatgtgattttaatgtgcttctcagtagactcccccgactcattagaaaacatcccagaaaaatggaccccagaggtaaaacacttttgtccaaatgtgccaattattctggtaggcaataagaaggatctgcgtaacgaccctactaccattaacgaacttaaaaagatgaaacaagaaccagtaaaacctcaagacggaagatccatggcagagaaaatcaatgcttttgcatatctagaatgttctgccaaaagtaaggagggtgtaagagaggtttttgaaaatgctacccgagctgcactgcaagtcaaaaagaagaagaagcccc

SEQ ID NO: 86 - DNA, 22 bp, Artificial Sequence
  primer
  misc_feature (1)..(22): forward primer
aactttgtgtgttttggcaggt

SEQ ID NO: 87 - DNA, 20 bp, Artificial Sequence
  primer
  misc_feature (1)..(20): reverse primer
ggggcttcttcttctttttg

SEQ ID NO: 88 - DNA, 1530 bp, Diabrotica virgifera
  misc_feature (1)..(1530): WCRW transcript ta15897.001_diavv
ggggatttaatgtccgccattttcgttcgtagttgaataggcgttaactttgtgtgttttggcaggtccgatggctgcaataagaaaaaaattggtgattgttggtgacggagcatgtggaaaaacatgtcttttaatagtatttagtaaagatcagttcccagaagtatacgtgcccactgtattcgaaaactatgtggcggatattgaagtagatggaaagcaggtagaactcgccttatgggataccgcaggtcaagaagattatgatcgtctgcggcccctttcatatccagacaccgatgtgattttaatgtgcttctcagtagactcccccgactcattagaaaacatcccagaaaaatggaccccagaggtaaaacacttttgtccaaatgtgccaattattctggtaggcaataagaaggatctgcgtaacgatcctactaccattaacgaacttaaaaagatgaaacaagaaccagtaaaacctcaagacggaagatccatggcagagaaaatcaatgcttttgcatatctagaatgttctgccaaaagtaaggagggtgtaagagaggtttttgaaaatgctacccgagctgcactgcaagtcaaaaagaagaagaagccccgttgtgtaatgttttgagccactacatattctatattttatattaataatcgttacgtgtgttaattaatttcaagggggcttctgcatgatgtattgactaacaaaataaacccctacttttctcttcagttctatttgttcaaactccttttctccttgtggacaaatttaagtattaagttatattttcatatgtatttaacccattgtttattggttcttagagttacacgacccagaaatttaattttaaaacaacacaacgatgtagcaagttactttttagagtttaatatagaatagatcattattttgtttctttattccccaccaaactagtattgcacattgcaattatttggctatgaattttaattgattaatgtaaaattttgatttttgaaatatccttagttgtctcgatttttgatgaacttccagtgaggggtgtgtaacttataagctttttttatacaatggtaaatgatataatcagtgtcatgtgcacaaaacttattgaacgtccacttagatcatcattgtagtactaatttacaagcatacgttgattcattttatagtatttatattttataacctgatcaatatattttgtttcaaaaatttttttctgtatctatagttatcttttacagatattcagagtacccattgatttttatttagttcaatgactgcagcacatttattatgttttgattagaagtcactgcaaatgaaacaagtggattaaaacttttgactaacagatacacaaaaaaatgtttgtgttgcagttattgcactgggactaaaaggactaacagtgatgtcatctcttgtgtaagggtagttactaccacctgttgtcctttaagtctcaaaattaattttga

SEQ ID NO: 89 - DNA, 444 bp, Diabrotica virgifera
  misc_feature (1)..(444): RNAi target sequence
cggcgttgtaaaccttttgtaaacattaaacattttgaaaattactgtattgctgcagcgatttacgtagaagtattttaagatgaatgcgcctccgacctttgaatcgtttttattatacgatggagagaaaaagatcattctagaacaagatacgaaagttccaaatgcagccatttttactatcaacaaagaggaccacacacttggtaatacgatcagaaaccaacttttaaaagatcccaacgtattattcgctggttacaaactacctcatccattggaacacaaatctgtcttgcgaattcaaacaacatcagactattcacctcaagaagccttaatgcacgctatcactgatttaatttcagaattgtccttgttcgaagaaagatttaaggaagcgatcaaagaaaagaaggaaggattggattaggcagtgaa

SEQ ID NO: 90 - DNA, 21 bp, Artificial Sequence
  primer
  misc_feature (1)..(21): forward primer
cggcgttgtaaaccttttgta

SEQ ID NO: 91 - DNA, 22 bp, Artificial Sequence
  primer
  misc_feature (1)..(22): reverse primer
ttcactgcctaatccaatcctt

SEQ ID NO: 92 - DNA, 575 bp, Diabrotica virgifera
  misc_feature (1)..(575): WCRW transcript ta06570.001_diavv
caaataacaggaaattgacactgacagttcgttggacaggaatgattttttcggcgttgtaaaccttttgtaaacattaaacattttgaaaattactgtattgctgcagcgatttacatagaagtattttaagatgaatgcgcctccgacctttgaatcgtttttattatacgatggagagaaaaagatcattctagaacaagatacgaaagttccaaatgcagccatttttactatcaacaaagaggaccacacacttggtaatatgatcagaaaccaacttttaaaagatcccaacgtattattcgctggttacaaactacctcatccattggaacacaaatttgtcttgcgaattcaaacaacatcagactattcacctcaagaagccttaatgcacgctatcactgatttaatttcagaattgtccttgttcgaagaaagatttaaggaagcgatcaaagaaaagaaggaaggattggattaggcagtgaatttttactttgatttagcttttgtaattaaggttaatgtgactaataaatatagttttattcaaaaaaaaaaaaaaaaaa

SEQ ID NO: 93 - DNA, 453 bp, Diabrotica virgifera
  misc_feature (1)..(453): RNAi target sequence
ctggttgtcataggttgtacgcagttaaattttttgtgataaaacttagtgttcctttgttatcaattaacatatataaaaatagtaatggctagtcggaagaagactttgttgaaggtcaccatcctgggtgattccagtgtgggaaagacttccttgatgaaccagtacgtaaataggaaattctccaaccaatacaaagcgaccataggtgctgatttccttacaaaagaactcacagtggacgatcgaactgttacaatgcaaatatgggatactgcaggtcaggaaaggtttcagtccttaggtgtagccttttacagaggggcagactgctgtgtgttagtatttgatgtaacttcccccacctcattcaaatccctggacagttggcgagacgaattcctcatccaagcatcgccccgagagccagaaaacttcccattgacctca

SEQ ID NO: 94 - DNA, 22 bp, Artificial Sequence
  primer
  misc_feature (1)..(22): forward primer
ctggttgtcataggttgtacgc

SEQ ID NO: 95 - DNA, 22 bp, Artificial Sequence
  primer
  misc_feature (1)..(22): reverse primer
tgaggtcaatgggaagttttct

SEQ ID NO: 96 - DNA, 640 bp, Diabrotica virgifera
  misc_feature (1)..(640): WCRW transcript ta40942.001_diavv
tagtaatggctagtcggaagaagactttgttgaaggtcaccatcctgggtgattccagtgtgggaaagacttccttgatgaaccagtacgtaaataggaaattctccaaccaatacaaagcgaccataggtgctgatttccttacaaaagaactcacagtggacgatcgaactgttacaatgcaaatatgggatactgcaggtcaggaaaggtttcagtccttaggtgtagccttttacagaggggcagactgctgtgtgttagtatttgatgtaacttcccccacctcattcaaatccctggacagttggcgagacgaattcctcatccaagcatcgccccgagagccagaaaacttcccattgacctcaagcgttattatccttataatacccttggtaccttaataactataagtacaagaagattccactataatattgttacaaattaagaaagtaacatattagatatattcaatcctttatatctctgaaaatattaaaaaaagcatacatctgatttacaaaagaaataagttgtaaaaatgcataagctctcagctgtaaatgtttttttgtgtcctttagtattattccagtgtttttaatatatctcataatattggaatattttttaa

SEQ ID NO: 97 - DNA, 601 bp, Diabrotica virgifera
  misc_feature (1)..(601): RNAi target sequence
gtgaacgccattgtgaactctaacgactttggaaccaagctgaagtaatccgtgattttttgtgccatcggtgtttcctagtactttttattcacaagtttaaattcaaaaaatcatggctggcgaacaagatatgcccaccttcaaatgcgtcttggtcggagatggaggtactggcaaaactacctttgtaaaaagacacatgactggtgaattcgaaaagaaatatgtagcaaccttaggagtagaagttcaccctttagttttccacacaaatagaggacaaattcgttttaacgtatgggacacagcaggccaagaaaagtttggtggtctgcgtgatggatactacatccaaggacaatgtgccataattatgtttgatgttacatctagagtcacttacaaaaatgttccaaactggcacagagatcttgttagagtttgtgaaaatatcccaattgtattgtgtggtaacaaagttgacatcaaagataggaaagttaaggcaaagagcattgtcttccataggaagaagaatttacaatactatgacatctctgcaaaatccaactacaactttgaaaaacccttcttgtgg

SEQ ID NO: 98 - DNA, 22 bp, Artificial Sequence
  primer
  misc_feature (1)..(22): forward primer
gtgaacgccattgtgaactcta

SEQ ID NO: 99 - DNA, 22 bp, Artificial Sequence
  primer
  misc_feature (1)..(22): reverse primer
ccacaagaagggtttttcaaag

SEQ ID NO: 100 - DNA, 1075 bp, Diabrotica virgifera
  misc_feature (1)..(1075): WCRW transcript ta05966.001_diavv
tatttggcgcgcattcctgacacctacgcgggtcttcttgtgaacgccattgtgaactctaacgactttggaaccaagctgaagtaatccgtgattttttgtgccatcggtgtttcctagtactttttattcacaagtttaaattcaaaaaatcatggctggcgaacaagatatgcccaccttcaaatgcgtcttggtcggagatggaggtactggcaaaactacctttgtaaaaagacacatgactggtgaattcgaaaagaaatatgtagcaaccttaggagtagaagttcaccctttagttttccacacaaatagaggacaaattcgttttaacgtatgggacacagcaggccaagaaaagtttggtggtctgcgtgatggatactacatccaaggacaatgtgccataattatgtttgatgttacatctagagtcacttacaaaaatgttccaaactggcacagagatcttgttagagtttgtgaaaatatcccaattgtattgtgtggtaacaaagttgacatcaaagataggaaagttaaggcaaagagcattgtcttccataggaagaagaatttacaatactatgacatctctgcaaaatccaactacaactttgaaaaacccttcttgtggttggctaggaaactcattggagatcccaacttagaattcgtagctgcacctgccttgcttcctccagaagtccagatggatccccaatggcagcaacaaatcgaaaaggatcttaaagaagcctcagaaactgcactgcccgatgatgacgaagatttataaactcattaaccaattactaaaactctgtcatcgttccaaagcgcgtgtgtaacaattgatatcttacaagacttaagttaaattacattttatgtatttctgaagcagaactgttgatatttttatataaatgttttctaaatttgttgaaaggtttgtctggagtctggacgtatgttcttcaatatattagtggtatggttgttagagtgttagagtcagcaagctaccgtaacagttcttgtcacataggagtgtagtcttaatttcaat

SEQ ID NO: 101 - DNA, 614 bp, Diabrotica virgifera
  misc_feature (1)..(614): RNAi target sequence
caacaattttcgcatctttctgtctgttcccggcgttctttgaaaaagttttcaataatactctaaaaaatggcagacgctgatgatctattagattatgaagatgaggaacagacagaacaaaccgcaactgaaacggcaactacagaggtacagaaaaagggtgtcaagggcacatatgtatcaatacacagttctgggtttagagattttctgttaaaaccagcaattctcagagctatagtggactgcgggttcgaacatccttcagaagttcaacatgaatgtattcctcaagctgtcattggcatggatattctgtgccaagctaaatccggtatgggaaaaacggctgtttttgtattagctacactccaagtaatagatcctacagaaaatgttgtatatgttctcgtcatgtgccataccagagagttagccttccagataagcaaagagtacgaacgtttcagtaaatatatgcccaatattaaagtaggggtcttctttggtggcttgcctatccagaaagatgaggaaacgttaaaaaataattgcccgcatatcgttgtgggtactccaggaagaattttagcattggtcagatcgaaaaa

SEQ ID NO: 102 - DNA, 22 bp, Artificial Sequence
  primer
  misc_feature (1)..(22): forward primer
caacaattttcgcatctttctg

SEQ ID NO: 103 - DNA, 22 bp, Artificial Sequence
  primer
  misc_feature (1)..(22): reverse primer
tttttcgatctgaccaatgcta

SEQ ID NO: 104 - DNA, 1515 bp, Diabrotica virgifera
  misc_feature (1)..(1515): WCRW transcript ta03347.002_diavv
ttggaaaacgcaatatatctatagaaaacaagcggtttatttgccgccattttgacaagcttacgtacctacatttttaattcgttgttttatttttagttttcaataatactctaaaaaatggcagacgctgatgatctattagattatgaagatgaggaacagacagaacaaaccgcaactgaaacggcaactacagaggtacagaaaaagggtgtcaagggcacatatgtatcaatacacagttctgggtttagagattttctgttaaaaccagcaattctcagagctatagtggactgcgggttcgaacatccttcagaagttcaacatgaatgtattcctcaagctgtcattggcatggatattctgtgccaagctaaatccggtatgggaaaaacggctgtttttgtattagctacactccaagtaatagatcctacagaaaatgttgtatatgttctcgtcatgtgccataccagagagttagccttccagataagcaaagagtacgaacgtttcagtaaatatatgcccaatattaaagtaggggtcttctttggtggcttgcctatccagaaagatgaggaaacgttaaaaaataattgcccgcatatcgttgtgggtactccaggaagaattttagcattggtcagatcgaaaaaacttaatctcaaacatctaaagcattttattttggatgaatgtgataaaatgttggagttattagacatgagacgtgatgttcaagaaatatatcgtaacactccccacgaaaaacaagtcatgatgttcagtgccaccttaagtaaagaaattagaccagtttgcaagaaatttatgcaagatcccatggaagtatatgttgacgacgaagctaaattaacattgcatggtctacagcaacattatgtaaaactaaaagaaaacgaaaagaataaaaagttatttgagttactagatgttttggagttcaaccaggttgtcattttcgtaaaatccgtacaaaggtgtgtggccctggcacaattactgactgaacagaacttcccagcgataggaattcacagaggaatggaccaaaaagaacgactgtcccggtatgaacaattcaaggatttccaaaagaggattctagtagccacaaacttatttggacgtggaatggatatcgaaagagtgaacatcgtcttcaactatgacatgcccgaagattctgacacttacctgcacagagtagcccgagctggacgtttcggtaccaaaggtctagccattactttcgtatcagaagagggagatgccaaaatattgaacgaagtacaagaaagatttgatgttaatattactgaattacctgacgaaatagatctcagttcatacattgaaggacgataagaatttcaagatctttgaagaattaattttaagatttagaataagatttccactaggtttaacgatttcaatttgtattatgtttcaatgttattgcattagtattaaaataaatgg

SEQ ID NO: 105 - DNA, 683 bp, Diabrotica virgifera
  misc_feature (1)..(683): RNAi target sequence
ggcatcttgtctcgtttatcgtaactcaaattaaacgtaaagatgtcgggaggaatcgaggctttaagccttaaagaggacgatgttaccaagatgttggcggcttccacccatcttggaacagcaaatgttgattttcaaatggaacagtatgtatacaaacgtcgtcatgacggtactcacatcatcaacttaaggaaaacgtgggaaaagattctcttggcagctcgtgccattgttgctattgaacaccctggtgaagttttcgtaatttcatctcgtccccatggccagcgtgctgttcttaagtttgctgctcacactggagctacccctattgctggaagatttactcctggtgcttttaccaatcagatccaagctgcattcagggaacctcgtctgttgatcgtcactgaccctgcttttgatcaccaacctatcactgaagcctcttacgtaaacattccagttattgctttgtgcaatactgattctccattacgttttgttgatattgccattcccggaaacaacaaagcctcacacagtattggtttactgtggtggcttttggctagagaggttctccgtcttagaggaatcattccacgggataccaaatgggatgttgtagtagatcttttcttctaccgtgaaccagaagaggctgaaaaggaaga

SEQ ID NO: 106 - DNA, 22 bp, Artificial Sequence
  primer
  misc_feature (1)..(22): forward primer
ggcatcttgtctcgtttatcgt

SEQ ID NO: 107 - DNA, 22 bp, Artificial Sequence
  primer
  misc_feature (1)..(22): reverse primer
tcttccttttcagcctcttctg

SEQ ID NO: 108 - DNA, 822 bp, Diabrotica virgifera
  misc_feature (1)..(822): WCRW transcript ta15911.001_diavv
gggggacagagacaggacataagcattaaaagggacgtaaaaacaacaaaggggctctttctcgtgcaaataacccaagtggcatcttgtctcgtttatcgtaactcaaattaaacgtaaagatgtcgggaggaatcgaggctttaagccttaaagaggacgatgttaccaagatgttggcggcttccacccatcttggaacagcaaatgttgattttcaaatggaacagtatgtatacaaacgtcgtcatgacggtactcacatcatcaacttaaggaaaacgtgggaaaagattctcttggcagcccgtgccattgttgctattgaacaccctggtgaagttttcgtaatttcatctcgtccctatggccagcgtgctgttcttaagtttgctgctcacactggagctacccctattgctggaagatttactcctggtgcttttaccaatcagatccaagctgcattcagggaacctcgtctgttgatcgtcactgaccctgcttttgatcaccaacctatcactgaagcctcttacgtaaacattccagttattgctttgtgcaatactgattctccattacgttttgttgatattgccattcccggaaacaacaaagcctcacacagtattggtttactgtggtggcttttggctagagaggttctccgtcttagaggaatcattccacgggataccaaatgggatgttgtagtagatcttttcttctaccgtgaaccagaagaggctgaaaaggaagaacaagctgccaaagaagctgtggctgctgttgtcaaacctgtagatatcccagctcctc

SEQ ID NO: 109 - DNA, 559 bp, Diabrotica virgifera
  misc_feature (1)..(559): RNAi target sequence
ggatggtttattgtctggaagctcattctaagtagattccgttttattaaagaactgttgaagggagcaagtgactctacaattacggaattgaaaaacactaggagtaaactcaagaggacaagaaaggactgatttatcttctcaaaatgaatattcgatgtgcaaaaccagaagatcttatgaacatgcagcactgcaatctgttatgtctaccagaaaactatcagatgaaatattacttttatcatggccttagttggccccaactaagttatgtagctgaagacgaaaaaggtaacatagttggttatgtcctagcaaaaatggaagaagaccaagaagatctcaagcatggtcacataacctccctggcagtgaagcgatcccacaggcgattagggctagcccagaaactgatggatcaagcttcagaagccatggtcgaatgtcttgacgcaaaatatgtttcgctgcatgttcgtaaaagcaatcgcgccgctttaaatctatacaaaaactctttgaaatttgaaactgtcgaaattgagccaaaata

SEQ ID NO: 110 - DNA, 22 bp, Artificial Sequence
  primer
  misc_feature (1)..(22): forward primer
ggatggtttattgtctggaagc

SEQ ID NO: 111 - DNA, 22 bp, Artificial Sequence
  primer
  misc_feature (1)..(22): reverse primer
tattttggctcaatttcgacag

SEQ ID NO: 112 - DNA, 903 bp, Diabrotica virgifera
  misc_feature (1)..(903): WCRW transcript ta05802.003_diavv
aaatatgcacttgtgacggcctttgacctaaatgtttagttaggaacaaaatggcgaaatgttggaactgataaacatcactgcctttttgtaatagttaagaattagatttttaattggaaaattgtaatgtagcaaattacttaagcgcctaactccaagacccattaatgcattcaggttaaacagtttattttatttaggatggtttattgtctggaagctcattctaagtagattccgttttattaaagaactgttgaagggagcaagtgactctacaattacggaattgaaaaacactaggagtaaactcaagaggacaagaaaggactgatttatcttctcaaaatgaatattcgatgtgcaaaaccagaagatcttatgaacatgcagcactgcaatctgttatgtctaccagaaaactatcagatgaaatattacttttatcatggccttagttggccccaactaagttatgtagctgaagacgaaaaaggtaacatagttggttatgtcctagcaaaaatggaagaagaccaagaagatctcaagcatggtcacataacctccctggcagtgaagcggtcccacaggcgattagggctagcccagaaactgatggatcaagcttccgaagccatggtcgaatgttttgacgcaaaatatgtttcgctgcatgttcgtaaaagcaatcgcgccgctttaaatctatacaaaaactctttgaaatttgaaactgtcgaaattgagccaaaatattatgcagatggtgaagatgcatattccatgagacgagacttatctgaattcgctaagaaagttaaacctaagtctgagactaaaaacgaagaatagtgtaattatttgtaatttttgtatttatagcgaatataatataca

SEQ ID NO: 113 - DNA, 368 bp, Diabrotica virgifera
  misc_feature (1)..(368): RNAi target sequence
ggttgcagaagatttcacaaaactttattatgatactctggataaacgacggcatttgatagcaagactgtatttggagacgggattattatcatggaatggtaatggtgtaactgggaatgaaaatattttgaaatttatgattgatttaccaccgtcatcttttactatacaaactctagacgcacagcctgttttagattctgcagtaaatggacaactgaccttcatcactcaagtgactggcagtgtaaaataccaagagaaaacaccaaaaacctttcagcgaaacttcataattacagcacagggcgataaatggaaaattgtcagtgattgtatgaggctgcaagaaccattaaacgcta

SEQ ID NO: 114 - DNA, 21 bp, Artificial Sequence
  primer
  misc_feature (1)..(21): forward primer
gttgcagaagatttcacaaaa

SEQ ID NO: 115 - DNA, 22 bp, Artificial Sequence
  primer
  misc_feature (1)..(22): reverse primer
tagcgtttaatggttcttgcag

SEQ ID NO: 116 - DNA, 470 bp, Diabrotica virgifera
  misc_feature (1)..(470): WCRW transcript ta08838.001_diavv
atttatgagaaatggaagatttaaggctaaaaattgatcaggcctgtaaggttgcagaagatttcacaaaactttattatgatactctggataaacgacggcatttgatagcaagactgtatttggagacgggattattatcatggaatggtaatggtgtaactgggaatgaaaatattttgaaatttatgattgatttaccaccgtcatcttttactatacaaactctagacgcacagcctgttttagattctgcagtaaatggacaactgaccttcatcactcaagtgactggcagtgtaaaataccaagagaaaacaccaaaaacctttcagcaaaacttcataattacagcacagggcgataaatggaaaattgtcagtgattgtatgaggctgcaagaaccattaaacgctaagaactaacaactgtatttttaagtattttgataaataaagtaattggtagac

SEQ ID NO: 117 - DNA, 589 bp, Diabrotica virgifera
  misc_feature (1)..(589): RNAi target sequence
acctggctgatgcaatagatttggtaaaagggttttctacctataaatttacaatatattattataaatagactaaactcatcaataaaaaagtttaagcaaatagccatatagctacaatggccgaagacgatgcaatctttgatccaaccctcaaaaaaaagaaaaagaagaagaagaccactttcgacattgatgctgctctagctgaaggtaacattgaaaatgattcagggaatgccccagctgcagaagctgataatattgaatcaaaacctgacgatgatcaggatgatggaaatgtggacattgatttagatttcactaaaaagaaaaagaagaagaaaaagcctttctcagctgatgatttagattcttccccagctgataataaagctgaaactactcaagatggagctggggacaatgatgggggtatggatgataactttgatttagatatggactttagtaaaaagaagaagaagaaaaccaagaaacctaagaatttagacgaacttattgcagaaactgaggagaaggatgatgatcaggagaatgtagatgaaaattcaacacaatgggtcaa

SEQ ID NO: 118 - DNA, 22 bp, Artificial Sequence
  primer
  misc_feature (1)..(22): forward primer
acctggctgatgcaatagattt

SEQ ID NO: 119 - DNA, 22 bp, Artificial Sequence
  primer
  misc_feature (1)..(22): reverse primer
ttgacccattgtgttgaatttt

SEQ ID NO: 120 - DNA, 1418 bp, Diabrotica virgifera
  misc_feature (1)..(1418): WCRW transcript ta00006.001_diavv
ggggtggagaagggtttcgtgtgaacagccgttgcacacgagtcagtcgatcctaagccctaggcgaaagccgatgttgatgtggttgggggacaacctggctgatgcaatagatttggtaaaagggttttctacctataaatttacaatatattattataaatagactaaactcatcaataaaaaagtttaagcaaatagccatatagctacaatggccgaagacgatgcaatctttgatccaaccctcaaaaaaaagaaaaagaagaagaagaccactttcgacattgatgctgctctagctgaaggtaacattgaaaatgattcagggaatgccccagctgcagaagctgataatattgaatcaaaacctgacgatgatcaggatgatggaaatgtggacattgatttagatttcactaaaaagaaaaagaagaagaaaaagcctttctcagctgatgatttagattcttccccagctgataataaagctgaaactactcaagatggagctggggacaatgatgggggtatggatgataactttgatttagatatggactttagtaaaaagaagaagaagaaaaccaagaaacctaagaatttagacgaacttattgcagaaactgaggagaaggatgatgatcaggagaatgtagatgaaaattcaacacaatgggtcaattccgatcgggactacacatatgacgaattactaaaccgtgcctttgaaataatgagagataaaaatccagatatggctgccggtaagaaacagaagttcgtcatgagacctcctcaagtagtcaaaatcggcgccaaaaagacgtcatttgcgaatttcacagagatatgcaaaatgcttcatcgtcaacccaagcatcttttagattttttactagctgaattgggtaccagcgggtctgtggacggtaataatcagctcatcattaaaggaaggtttcaacagaaacaaattgaaaatgtactcaggagatacatcaaggaatacgtcacttgtcatacatgtagatccccagatacaattcttcaaaaagacactagattgttcttcttacaatgtgaaacgtgtggttctaggtgttctgttgctagtattaaatcaggtttccaggctgtcacttccaaacgtgctgcaattcgagccaagacagcataggaaccttagatattgcaatacaataataaataggcactgttacagaagaaatttcaaagtgctaaagaataggtgttgtatgtgttatataatttgtactataaatctagctgaattgttaaatggaattaacaatcatattaatatcaacaattttaattatataacttttttattgattattaaattttaataaacagtaaataattatttatatttttcgtccataaaaaaaaaa

SEQ ID NO: 121 - DNA, 610 bp, Diabrotica virgifera
  misc_feature (1)..(610): RNAi target sequence
gtagcggaaccgtcaaaaagtcgggccctcgcaagagagttcgtcggggtaacccaaaaggacctggagacgtcgtcgagagatccgggaagaatctcgcactcttctcgaacaagccgaccgtgctcgtcgccaagctgaacaagaattgggagatgctcacgaacaattgaacgatcttggagcccaaaacgcttccttgtctgccgccaagaggaaattggaaaccgaattgcaaaccctccactcagaccttgacgaacttctcaacgaagccaagaactccgaagagaaggccaagaaggctatggtagatgccgctcgtctcgctgatgaactccgcgctgaacaagaccatgcccaaacacaagagaaactccgtaaagctctcgaagctcaaatcaaggacctccaagtacgcttggacgaagctgaagccaatgcccttaaaggaggaaagaaggctattgccaaattggaacaacgtgttagagaattagaaaatgaattagacggtgaacaaaggcggcacgcggatgcccaaaagaacttgagaaagtctgaacgtcgtatcaaggaacttagcttccaagctgaagaagaccgcaag

SEQ ID NO: 122 - DNA, 21 bp, Artificial Sequence
  primer
  misc_feature (1)..(21): forward primer
gtagcggaaccgtcaaaaagt

SEQ ID NO: 123 - DNA, 20 bp, Artificial Sequence
  primer
  misc_feature (1)..(20): reverse primer
cttgcggtcttcttcagctt

SEQ ID NO: 124 - DNA, 669 bp, Diabrotica virgifera
  misc_feature (1)..(669): WCRW transcript ta41130.001_diavv
gggcacacccattgggcgaaagggaatccggttcctattccggaacccggtagcggaaccgtcaaaaagtcgggccctcgcaagagagttcgtcggggtaacccaaaaggacctggagacgtcgtcgagagatccgggaagaatctcgcactcttctcgaacaagccgaccgtgctcgtcgccaagctgaacaagaattgggagatgctcacgaacaattgaacgatcttggagcccaaaacgcttccttgtctgccgccaagaggaaattggaaaccgaattgcaaaccctccactcagaccttgacgaacttctcaacgaagccaagaactccgaagagaaggccaagaaggctatggtagatgccgctcgtctcgctgatgaactccgcgctgaacaagaccatgcccaaacacaagagaaactccgtaaagctctcgaagctcaaatcaaggacctccaagtacgcttggacgaagctgaagccaatgcccttaaaggaggaaagaaggctattgccaaattggaacaacgtgttagagaattagaaaatgaattagacggtgaacaaaggcggcacgcggatgcccaaaagaacttgagaaagtctgaacgtcgtatcaaggaacttagcttccaagctgaagaagaccgcaagaaccacgaga

SEQ ID NO: 125 - DNA, 628 bp, Diabrotica virgifera
  misc_feature (1)..(628): RNAi target sequence
ccagtatttagaccggcatctcgtttttcccttattggaatttctgtccgcaaaaggaatttacaatgagaccgaactgttaaaagccaaattagatattctaagcaagactaatatgatagattatgctattgatatcagaaaacaactgtaccctgatcaggaaatacccgaggacctaaaacagaggcgtaatcatgttgtgcagcagctagcagagttgcaagaagaggttaagcctatccttaagattatggaatctgaagaagttatgaagaatatggaaaacatgagagattcgaaaacacttattacatatttgtcaaaagaattcaagtttgaaattgaattgatcgacagtcttcacaaactagccaaatacagatacgactgtggcaactacacagtatctacatcctacctgtacttctgtatgctggtattacctcctaatgacaggaactatcttagtgccttgtggggaaaattcgcttcagaaattctgtaccaaaactgggattcagccctggaagatctcaacaaactgagggaatatattgattccagtcccaatcagttttctggcaacagtttgcagcttctccaacagaggacttggttgatccat

SEQ ID NO: 126 - DNA, 22 bp, Artificial Sequence
  primer
  misc_feature (1)..(22): forward primer
ccagtatttagaccggcatctc

SEQ ID NO: 127 - DNA, 22 bp, Artificial Sequence
  primer
  misc_feature (1)..(22): reverse primer
atggatcaaccaagtcctctgt

SEQ ID NO: 128 - DNA, 1547 bp, Diabrotica virgifera
  misc_feature (1)..(1547): WCRW transcript ta05495.001_diavv
tttttagaggctacttctcgtagctctgcttgttgaattttaaaatattgaaagtagtaaatattgaagaaagtattaataacacaatcatggcaaagttcgacttaacttcgaagatgggccagtatttagaccggcatctcgtttttcccttattggaatttctgtccgcaaaaggaatttacaatgagaccgaactgttaaaagccaaattagatattctaagcaagactaatatgatagattatgctattgatatcagaaaacaactgtaccctgatcaggaaatacccgaggacctaaaacagaggcgtaatcatgttgtgcagcagctagcagagttgcaagaagaggttaagcctatccttaagattatggaatctgaagaagttatgaagaatatggaaaacatgagagattcgaaaacacttattacatatttgtcaaaagaattcaagtttgaaattgaattgatcgacagtcttcacaaactagccaaatacagatacgactgtggcaactacacagtatctacatcctacctgtacttctgtatgctggtattacctcccaatgacaggaactatcttagtgccttgtggggaaaattcgcttcagaaattctgtaccaaaactgggattcagccctggaagatctcaacaaactgagggaatatattgattccagtcccaatcagttttctggcaacagtttgcagcttctccaacagaggacttggttgatccattggtctctctttgtgtttttcaatcatgttatgggcagagaattgattattgaaatgttcttgtatagaccacactacctcaacgccatccagaccatgtgtcctcatatcttgaggtatttggctacagctgtaattattaatcgtggaaggagatcagcactgaaggacttagttaaagttattcagcaagaaagctacacttacagagatcccattacagagtttgtggaacacctttacgtcaacttcgatttcgatggagcccgtcaaaaattacacgaatgccaaacagttttactaaacgacttcttcctaatttcctgtttagacgaattcgtagaaaacgccagacttatgatcttcgagacattctgcagaattcatcaatgcatcagtataggcatgttagccgaaaagctcaacatgaatccagacgaagctgaatgctggatcgtgaatttgatcagaaacgcacgattggatgctaagatcgattctaagttagggcatgtggttatgggtgctcaacctttatcgccataccagcaacttattgaaaaaattgattccctttcggtcaggtcagaaactctgtgtgctcttatagatagaaagctcagagcgaggactgacgtaagtttctaaaggtacgttaacgaaatgatgcaagaatttgtcatttttgttacagatacgttggggaaatccagatttttaaatatctgttattttgtaataattttattggatacaaataaaagatctttccagtatgtcaaaaaaaaaaaaaaaaaa

SEQ ID NO: 129 - DNA, 619 bp, Diabrotica virgifera
  misc_feature (1)..(619): RNAi target sequence
tcacattccagttgtttagagcacttagtagagatatacacctttaagcatgtcgtgttcagcgatatatattttagatgtaaaaggaaaagtcttaatctctaggaactatagaggcgatatagacctaggtgtaatagagaagtttatgcctttattaatggaaaaagaagaagaagggcttctaactccaattttgcaaatccctgaatgcaccttctcatatattaaaaccaacaatctatatatagtaagcactacgaagaaaaatggtaatatcgctcttgtatttgtatttttacataaaatcgttcaagtaatgactgaatattttaaagaattagaagaagaaagtatcagagataattttgtcgttatttatgagttgttggacgaacttttagactttggctatcctcaaacaactgatagcaaaattcttcaagaatacatcactcaagaaggtcataaactagagatacaaccaagaattcctgtagctgtgacaaatgcagtttcatggcgttctgagggaatcaaatacaggaaaaatgaagtattcttagatgtaatcgagtcagtaaatcttttagcaagtgcaaatggcaatgtactaaga

SEQ ID NO: 130 - DNA, 20 bp, Artificial Sequence
  primer
  misc_feature (1)..(20): forward primer
tcacattccagttgtttaga

SEQ ID NO: 131 - DNA, 20 bp, Artificial Sequence
  primer
  misc_feature (1)..(20): reverse primer
tcttagtacattgccatttg

SEQ ID NO: 132 - DNA, 2131 bp, Diabrotica virgifera
  misc_feature (1)..(2131): WCRW transcript ta08478.001_diavv
agtaaataataatgattataatatggtttgcaaatagttaaatgcagtatgtgattttctgaagaagtgaagaggttatatcacattccagttgtttagagcacttagtagagatatacacctttaaacatgtcgtgttcagcgatatatattttagatgtaaaaggaaaagtcttaatctctaggaactatagaggcgatatagacctaggtgtaatagagaagtttatgcctttattaatggaaaaagaagaagaagggcttctaactccaattttgcaaatccctgaatgcaccttctcatatattaaaaccaacaatctatatatagtaagcactacgaagaaaaatggtaatatcgctcttgtatttgtatttttacataaaatcgttcaagtaatgactgaatattttaaagaattagaagaagaaagtatcagagataattttgtcgttatttatgagttgttggacgaacttttagactttggctatcctcaaacaactgatagcaaaattcttcaagaatacatcactcaagaaggtcataaactagagatacaaccaagaattcctgtagctgtgacaaatgcagtttcatggcgttctgagggaatcaaatacaggaaaaatgaagtattcttagatgtaatcgagtcagtaaatcttttagcaagtgcaaatggcaatgtactaagaagcgaaatagtgggagcaataaaaatgagagtgtatctttctggtatgcctgaactgagattaggtctcaatgataaagtattattcgagagtacaggacgtggtaaatctaaatcggtagagttagatgatgttaagttccatcaatgtgtaagattatcaagattcgagatagatagaacaatctcttttattccaccagatggtgaatttgaattaatgtcttatcgtttaaatacccatgtgaaaccattaatatggattgaatctgttatagaaagacatgcgcatagtagagtggagtacatgattaaagctaaatcgcaattcaagagacgttctactgctaacaatgttgaaataatcattccagtgccacatgatgcagactctccgaagtttaaaaccaccatcggcagtgtcaagtatgcccctgaacaaaatgccataacttggagtatcaaatcattcccagggggtaaagagtatttgatgagagcccactttggtttacctagtgttgaatgtgaagatactgagggtaaaccacctattcaggtcaaatttgaaattccatattttacaacttctggaatacaagtcagatacttgaagattatagagaaaagtgggtatcaagctctaccatgggtgagatatattacacagaatggtgactaccagttgcgtactaattaagcgttgttattgtacttttctgctttttaagttagaatataatatatttttacttatactttatttgtagggtcttataaaactttgtactatgtagcactatattcagttaatatattttaaaataaacattactttttcatgtactgttctcacaattcattataacttgtttcagcattatctatttcaaaatatttaaagtatgtacttaaacatttgacattgaataaatttacctattttattcttaaattttgggtgctttgagacaagctcagcggttggacaactgagtaagcggtagcgtttagacaacacaatgacaagccactgttaaatttactaagcgtattttctttctgctgtgtaactcagtggttgcttgggtacagtacgcaataatgagtttaaatttttttaaacttttcataaaatattcaattgacccaaaaaatggatttacagtggaataagagaagtacattttggtactgtacgagaatatttatttctagaagtattatgtaaatattatgcaaatatgtttattactactggatctaagccgtttttgtagttaatgtcagccactgaggtcgtctgaatgtacccattggttatcctgtcttttatcaagttgccatgccttcaagcgtcggaaaagttttgattttaagagagtaggcgcaaaatttaactggattcatttttttcgaatcctgagaaaact

SEQ ID NO: 133 - DNA, 660 bp, Diabrotica virgifera
  misc_feature (1)..(660): RNAi target sequence
acctccaaaagaccatcaagaaacaatccctgcaactcaccgaaatccaggctcactatgacgaaatccaacgtcaattgcaagttactcttgaccaactcagcgtatcacaaagaagggtacaggcacttaccgccgaatctgaagaaatcaggagcaattatgaaggtgctcttcgtggtaagaggcaagccgagcaaatgtacgaagaagctggcactcgcatcaacgagctcaccaccatcaacgtcaacctttcttcaatgaaggtcaagattgaacaagaactgtcctcagttcttgctgactacgatgaaatcaccaaggaactccgcatttctgatgaacgctaccaacgtgtacaggccgaactcaaacataccgtcgaaatcctacatgaagagcaagagcgcgtggtcaagatcgaagctatcaagaagagtctggaaatcgaagtcaagaacctctcagtccgtttggaagaagtcgaagccaacgctatcgttggaggaaaacgtatcatcagcaaactcgaagctcgtatcagggattgcgaagctgaactcgatgaagaaaagagacgccacgccgaaaccatcaagatcttgcgcaagaaggaacgcactgttaaggaagtcatgatccaatgtgaagaggacc

SEQ ID NO: 134 - DNA, 22 bp, Artificial Sequence
  primer
  misc_feature (1)..(22): forward primer
acctccaaaagaccatcaagaa

SEQ ID NO: 135 - DNA, 21 bp, Artificial Sequence
  primer
  misc_feature (1)..(21): reverse primer
gtcctcttcacattggatcat

SEQ ID NO: 136 - DNA, 3369 bp, Diabrotica virgifera
  misc_feature (1)..(3369): WCRW transcript ta00254.002_diavv
aatcaagtatattcaaatgggaaacaagccacaatttcacctaaaaacgactttatcgacgtctcgacgctcatatacgaacgactctgccaccactgtcaggcggcgcaggcacgcggatttcaatcttgaaattttcgacggtcagtgcaccaacgacacgactatacattcacaaaaaagcaaaaaaatctcttgaagatggcttcttcctctgtggcgaggacctccaaatactcttaccgttccacaggagctgcaggaggcagtgctgacgtcagcatcgaatacagcgcggatctgacagcgctttctaggcttgaggataaaattcgcctacttcaggatgacctagaaattgaacgagaacttagatctagaatcgaaagagaaaaagccgaccttagtgtacaagtaatccaattatcagaacgtctagaagaagctgagggtggtgcagaaagtcagtttgaaattaacaaaaaacgtgacacagaattgctgaagcttcgcaaactattagaagatgtacacatagagtcagaagaaactgctctcatcctcaagaagaaacatcaagaaatcgttgtcgacttccaagaacagattgattccttagctaaagcaaaatcaagagccgaaaaagaaaagggcaaattccaagccgaaatctaccagctcatcgcccaggtcgaaagcgtaaccaaagaacgcttgatttccatcaaacaatgtgagaaactagaaatcaccgtcaacgagctcaacatcagaatcgaggagcttaaccgttccgtcgttgacatcacctcccacaagacccgtctctcccaagagaacatcgagctcatcaaggaagtccaagacctcaaggtcaatatcgaaaacgccatctacctcaagagccagctcgccggccaactagaggatgcccgccgccgtgctgaagacgatgaaagaagacgctcccttttggaggccaacctccaccaggtcgagatcgaacttgaatctgtccgtgtgcaacttgaggaagaaagcgaagctcgtcttgaccttgaacgtcaattggtcaaatcccaaggtgaggttcaagtctacaaatccaaatatgaaaccgaagtcgttgctcgtgctgaagaagttgaagaaatccgtcgcaaattcaccatcagaatccaagaacaagaagaacacattgaagccctcttggtcaaggtcaacaacctcgagaagcaaaagtcccgcctccaatccgaagtcgaggttcttatcattgacttggagaaagcaaataacaccgctagagaacttcaaaaacgcgttgaacaactcgagagaatcaatattgacttgaagacccgtctcgatgaaacagttcaattgtacgagcaaagccaacgtgacctccgtaacaaggttactgaattgcaacgcgctgtacacgaattggacaaaactcgcgaactgaaggaccaacttgccagagaaaacaagaaattatgcgacgatctcagcgactccaagattaccattaccgagcttactcgtcgtctccatgaactcgacttggaagttcgccgtttggaaaatgaacgtgatgaacttactgcagcctacaaagaagctgaagccggacgtaaagctgaagaacaacgtgcccaacgccttgccgccgaacttggtcaattccgtcacgaagccgaaaaacgtcttcaagaaaaagacgaagaaattgaagctatccgcaaggcaaccagcatcgaaattgaacagctcaatgcccgcgtcgttgaagccgaaaccaggctcaagactgaggtcacccgcatcaagaagaagttgcagatccaaatcaccgagctcgagatgtccttggactccgccaacaaactcaacatcgacctccaaaagaccatcaagaaacaatccctgcaactcaccgaaatccaggctcactatgacgaaatccaacgtcaattgcaagttactcttgaccaactcagcgtatcacaaagaagagtacaggcacttaccgccgaatctgaagaaatcaggagcaattatgaaggtgctcttcgtggtaagaggcaagccgagcaaatgtacgaagaagctggcactcgcatcaacgagctcaccaccatcaacgtcaacctttcttcaatgaaggtcaagattgaacaagaactgtcctcagttcttgctgactacgatgaaatcaccaaggaactccgcatttctgatgaacgctaccaacgtgtacaggccgaactcaaacataccgtcgaaatcctacatgaagagcaagagcgcgtggtcaagatcgaagctatcaagaagagtctggaaatcgaagtcaagaacctctcagtccgtttggaagaagtcgaagccaacgctatcgttggaggaaaacgtatcatcagcaaactcgaagctcgtatcagggattgcgaagctgaactcgatgaagaaaagagacgtcacgccgaaaccatcaagatcttgcgcaagaaggaacgcactgttaaggaagtcatgatccaatgtgaagaggaccaaaagaacatcgctctattgcaagaaactttagacaaggctaattcgaagattactattttcaagagacaactacaagaagtcgagggtgtatctagccaaagcataactcgcgtacgtcgattccagagggaattggaagccgccgaagaccgtgccgaaaccgccgaaagcaatctgtccctcatccgcgccaaacaccgcactttcgtcaccaccagcacagtacctggctcccaagtctacttggtacaagaacaacgagcatcttccgaaatctaatcatctcctattctagctactaataaactaccccatccggccgaataacaacgtcaaagacatttatccatacagcagcgacatctgcgaaggaaaacttgagttggaagactcgtttcccttcgtcagtttcttgctgtgtgtaaacttgtctttgggctcgcgacatggtggaagacatcatcatacaagatcatttttttttgttcttcgtgcacataattaaataatatttaccactctctttgaaatattattattattattataacgaaacgtacatatttcattaaataaattaataaaatgagtaagcgatttatatttgtttgcaatcgcacgatgagtccatggtatggaaatttgtaggtttctaataaactgttatgttatgtaattgtacttatatcactgatgtgtgcttctattagaggtacaagggttattggaatgtaatttataagtttttgaatgtaccgtgtaagaataaattgcttataaataaaaaaaaaaaaaaaaaatcgg

SEQ ID NO: 137 - DNA, 589 bp, Diabrotica virgifera
  misc_feature (1)..(589): RNAi target sequence
cgatttatcagcttcccaattctctcctgatggaagagtatttcaagttgaatatgcaatgaaagcagttgaaaatagtggcaccgtaataggcctccgaggtacagatggcattgtattggctgctgaaaagctcattatgtcaaaattgcatgaaccaagtacaaataaacgaattttcaacattgataaacacataggaatggcattttcaggcttaatagctgatgcaaggcaaatcgttgagattgctagaaaagaagcatcaaattatagacatcaatatggttcaaatattcctcttaaatacctaaatgatagagtaagcatgtacatgcatgcatacactttatacagtgctgttagaccatttggttgcagtgtcatcttggccagttatgaagatagtgacccatctatgtatctgattgatccatctggagttagctatggatactttggatgtgctacaggtaaagcaaaacagtctgcaaagactgaaatagaaaaattgaagatggggaatctaacatgcaaagaacttgttaaagaagcagccaaaatcatttatttggtccatgatgagctg

SEQ ID NO: 138 - DNA, 22 bp, Artificial Sequence
  primer
  misc_feature (1)..(22): forward primer
cgatttatcagcttcccaattc

SEQ ID NO: 139 - DNA, 22 bp, Artificial Sequence
  primer
  misc_feature (1)..(22): reverse primer
cagctcatcatggaccaaataa

SEQ ID NO: 140 - DNA, 956 bp, Diabrotica virgifera
  misc_feature (1)..(956): WCRW transcript ta06609.001_diavv
aaaaaatcaaaatgagttctattggaactgggtacgatttatcagcttcccaattctctcctgatggaagagtatttcaagttgaatatgcaatgaaagcagttgaaaatagtggcaccgtaataggcctccgaggtacagatggcattgtattggctgctgaaaagctcattatgtcaaaattgcatgaaccaagtacaaataaacgaattttcaacattgataaacacataggaatggcattttcaggcttaatagctgatgcaaggcaaatcgttgagattgctagaaaagaagcatcaaattatagacatcaatatggttcaaatattcctcttaaatacctaaatgatagagtaagcatgtacatgcatgcatacactttatacagtgctgttagaccatttggttgcagtgtcatcttggccagttatgaagatagtgacccatctatgtatctgattgatccatctggagttagctatggatactttggatgtgctacaggtaaagcaaaacagtctgcaaagactgaaatagaaaaattgaagatggggaatctaacatgcaaagaacttgttaaagaagcagccaaaatcatttatttggtccatgatgagctgaaggataagaattttgaactggaactttcatgggtatgcaaagatacgaatggtttacataccaaagtgcctgaatcagtgtttgctgatgcagaaaaagctgccaaacaagcaatggaagcagattcagaatcagatacagaagatatgtaataactacatttagtttttaatatttcgctgatggtggctgttcttacaatatttcgtgtgttatgttcatatattatgtaatactgtgagaatttccatttcaaggataggtttataacttttttttctaataaatacataactttatgtcaaaaaaaaaaaaaaaaaaaaaaaaaaaaa

SEQ ID NO: 141 - DNA, 577 bp, Diabrotica virgifera
  misc_feature (1)..(577): RNAi target sequence
aattggtgcagatacacgtttgagtactggattttccatttataccagagaacaaaacaaacttttcccactatcaggcactactgttttgggttgtgcaggatgttggtgtgacactctaacattaaccagaatccttaaatctcgcatgcagatgtaccaacaagagcataacaaaacaatgtctacaactgcatgtgcccagatgttgtcaaccatgctctactacaagagattctttccttattatatatcaaacattctagtaggtttagataatgaaggaaagggctgtgtttacagctatgatcctattggacattgtgaaaaagctacgtatagagcaggtggttcagctggagctcttcttcagcctctgttggacaatcaaattggacagaagaacatgcttaaaacatctggggaacctcttagtcaggagaaagctctgtctacccttaaagatgtatttatttctgctgctgaaagagacatctacactggagatagcgtacttataaatattattactaaagatggagtaaaggaagagtccttccagttgagacgggattag

SEQ ID NO: 142 - DNA, 22 bp, Artificial Sequence
  primer
  misc_feature (1)..(22): forward primer
aattggtgcagatacacgtttg

SEQ ID NO: 143 - DNA, 22 bp, Artificial Sequence
  primer
  misc_feature (1)..(22): reverse primer
ctaatcccgtctcaactggaag

SEQ ID NO: 144 - DNA, 913 bp, Diabrotica virgifera
  misc_feature (1)..(913): WCRW transcript ta03835.001_diavv
gggggcagttatttcgacttttcatgcttgtcataaaataaaattaaaatatatccggcgaggtgttgactagcggatttttttagattcaacaatcttattttataaaataattagttaaaatgatgcaaacagctaataatgcatattatcccgattattccactgctccaatgcaacgtcaaattaacccctatgcagataatggagggagtgtagtagcaatagcaggtgaagactttgtaataattggtgcagatacacgtttgagtactggattttccatttataccagagaacaaaacaaacttttcccactatcaggcactactgttttgggttgtgcaggatgttggtgtgacactctaacattaaccagaatccttaaatctcgcatgcagatgtaccaacaagagcataacaaaacaatgtctacaactgcatgtgcccagatgttgtcaaccatgctctactacaagagattctttccttattatatatcaaacattctagtaggtttagataatgaaggaaagggctgtgtttacagctatgatcctattggacattgtgaaaaagctacgtatagagcaggtggttcagctggagctcttcttcagcctctgttggacaatcaaattggacagaagaacatgcttaaaacatctggggaacctcttagtcaggagaaagctttgtctacccttaaagatgtatttatttctgctgctgaaagagacatctacactggagatagcgtacttataaatattattactaaagatggagtaaaggaagagtccttccagttgagacgggattagaagcaagtggttttgtttatattttcttatgtgaaattcaaatatactttctaaataaacaaaaaaaaaaaaaaaaaaaaaaaaaaaaa

SEQ ID NO: 145 - DNA, 542 bp, Diabrotica virgifera
  misc_feature (1)..(542): RNAi target sequence
tcttcgttcaataccagcttcagtgatgatccccagtctgactacacctcctgaagaaccatctcttgacatggcaagtgccaatgtatttgtgacaaacttcacacattcttccttgctcatattgggcttgaagttggcatctacgtaaccataaacataactggaacctgatcctccgattgacacttcttgtctaacacacatcccaccaattggtatggaatatacttgtccgcctttctttttatcccaacctgctaccagtataccagccattagcgaatctctataattgtagcaaagttcttggaaaatggcggcacctacttgtactttgggttcttcaccaagttccataccatgaaaattaagatgataagcaacaatgtctgcaattgcttgtgtatctgctgcagatcctgaacgacaacagtatatatggtcagtgactttggtgagtttgtctgctacccggtttgcaatgtaggccccagtagttgtgcgagaatctgctcctataacaacgcctccatcaaact

SEQ ID NO: 146 - DNA, 22 bp, Artificial Sequence
  primer
  misc_feature (1)..(22): forward primer
tcttcgttcaataccagcttca

SEQ ID NO: 147 - DNA, 22 bp, Artificial Sequence
  primer
  misc_feature (1)..(22): reverse primer
agtttgatggaggcgttgttat

SEQ ID NO: 148 - DNA, 850 bp, Diabrotica virgifera
  misc_feature (1)..(850): WCRW transcript ta02145.001_diavv
attgcagggggactggcaaaatattgcattgtaggattacaagtgtaatttttctaagcttgtattcttttcattaaacttgtaaaaaatgcctcttatgactgagtatggtgcaatgactggtcctaatgattggagagatgccgctcacagtacaggaacctctattatggccgcggagtttgatggaggcgttgttataggagcagattctcgcacaactactggggcttacattgcaaaccgggtagcagacaaactcaccaaagtcactgaccatatatactgttgtcgttcaggatctgcagcagatacacaagcaattgcagacattgttgcttatcatcttaattttcatggtatggaacttggtgaagaacccaaagtacaagtaggtgccgccattttccaagaactttgctacaattatagagattcgctaatggctggtatactggtagcaggttgggataaaaagaaaggcggacaagtatattccataccaattggtgggatgtgtgttagacaagaagtgtcaatcggaggatcaggttccagttatgtttatggttacgtagatgccaacttcaagcccaatatgagcaaggaagaatgtgtgaagtttgtcacaaatacattggcacttgccatgtcaagagatggttcttcaggaggtgtagtcagactggggatcatcactgaagctggtattgaacgaagagttgttttaggaaatgaattgcccaaattttatgaaggttaattgattattttttaagctttggtatgttttggtatatattaaaataaaaaaatcagttttacactaaaaaaaaaaaaaaaaaatcgg

SEQ ID NO: 149 - DNA, 559 bp, Diabrotica virgifera
  misc_feature (1)..(559): RNAi target sequence
ctgaattgaccaacaaattggattcaattagagggtttttacattctcgtttacgtaccgctacactcaggaacgactttgaaggtcaagctgtgtttataaattgcctgttgagaaattatttgcattattcgttgtatgatcaagctgacaaactagtgagtaaatgcgtatttcctgaaactgcaagtaacaatgaatgggccagattcttatactacttgggcagaattaaggcggcaagattagaatacagtgtagcacataaacatcttgtgcaggccatgagaaaagcaccccagaatgctgccattggtttcagacaggttgttcaaaagcttactgttgtagttgaactactgctaggagatataccagaacgacagatttttagacaatctagtatgaggcactcccttgccccatactttcaactaacacaagcagttagaatgggcaatttgcaaagatttggtgaggtgttagagaacttcggcccacaatttagacaagatcatacatttacactaattttgagactgcgccacaatgttattaa

SEQ ID NO: 150 - DNA, 22 bp, Artificial Sequence
  primer
  misc_feature (1)..(22): forward primer
ctgaattgaccaacaaattgga

SEQ ID NO: 151 - DNA, 22 bp, Artificial Sequence
  primer
  misc_feature (1)..(22): reverse primer
ttaataacattgtggcgcagtc

SEQ ID NO: 152 - DNA, 1711 bp, Diabrotica virgifera
  misc_feature (1)..(1711): WCRW transcript ta08208.001_diavv
ggggggaggggattgtcaaatagttgtcagcgttacacagcgaatattttcctcatcagttcaatattaacaataaattgttttgttgaaattgaaatcacaaattactttataaaatggtaactctagaagacgttgaaatgaaaaatgcagacagtcctccaggattagaagctggtgatacaaagaaagataccgacctacaaagtgtaatagaaattcgtgaacatgcaagacaaatagaaaaatcagtcacaagtaaagaaaaccgtttcatcttacgagttttacgttgcttgcccaacactagaaggaagcttaatggactggtgctgagaagcctcattactcaaatatatcctgtagctgaacgtgatgccctccttagtttcgtcgaggaagcttctggagaactcgacgccacccagtcacgagcaagatcagctgttaagtcacctgttcccgaggtagatacatatataaatcttttaatactagtacgtttaattgataccaataagttagttgaagcagagcgctgttctcaagctcttatgaataaaataactaaccaaaacagacgtactatagatcatattgctgccaagtgttatttctatcactcaagagttgctgaattgaccaacaaattggattcaattagagggtttttacattctcgtctacgtaccgctacactcaggaacgactttgaaggtcaagctgtgcttataaattgcctgttgagaaattatttgcattattcgttgtatgatcaagctgacaaactagtgagtaaatgcgtatttcctgaaactgcaagtaacaatgaatgggccagattcttatactacttgggcagaattaaggcggcaagattagaatacagtgtagcacataaacatcttgtgcaggccatgagaaaagcaccccagaatgctgccattggtttcagacaggttgttcaaaagcttactgttgtagttgaactactgctaggagatataccagaacgacagatttttagacaatctagtatgaggcactcccttgccccatactttcaactaacacaagcagttagaatgggcaatttgcaaagatttggtgaggtgttagagaacttcggcccacaatttagacaagatcatacatttacactaattttgagactgcgccacaatgttattaaaacagctataagatccataggattatcatactccagaatatctccccaagacatagctaagaaactggggctggattcagctgaagatgcagaatttatagtagcaaaagcaatcagagatggggtgatagaagctacacttgatccacagggaggttacatgaggagcaaagaaagtactgacatctactgcacaaaggaacctcaactggcgtttcatcaaagaatatcgttttgcttagatttgcacaatcaaagtgtcaaagctatgagatatccccccaaggcgtatggcaaagaacttgaatcagcagaagagagaagggaaagagaacagcaggatttggagttggccaaggaaatggctgaagaagatgatgatggttttccttaagttggtgtagttatcaatattaattttataacatttttgcttttgtatggtatttatagacagtagatttatcaaaatatactgagtaaaactccaaaaaaaaaaaaaaaaaaaaaaaaaaaaaa

SEQ ID NO: 153 - DNA, 473 bp, Diabrotica virgifera
  misc_feature (1)..(473): RNAi target sequence
atgtgtgatgactggcatgattgctgacagcaagtcccaggtgcagagagctagatatgaggctgccgagttcaaatataagtttggatatgagatgccaatcgatgccttgtgtaggagagtatcggatatttcccaggtttatacgcagaatgctgagatgagacctttgggttgctccatgcttctgataggatatgaccaagaaatgggaccatgtgtccacaaagctgaccctgctggctattactgtggctacagagcagtaagtgtaggatccaaacaaactgaagccaacagctacctagagaagaagctaaagaagaaaactgatctgtccaaagatgaagtcatccaattggcaatcagttgtctttcaagtgttttatctgtagattttaaaccaacagaagtcgaagttggggttgttactaaggatgagcccaagtttaggaaattgacggaacaagaaa

SEQ ID NO: 154 - DNA, 22 bp, Artificial Sequence
  primer
  misc_feature (1)..(22): forward primer
atgtgtgatgactggcatgatt

SEQ ID NO: 155 - DNA, 22 bp, Artificial Sequence
  primer
  misc_feature (1)..(22): reverse primer
tttcttgttccgtcaatttcct

SEQ ID NO: 156 - DNA, 879 bp, Diabrotica virgifera
  misc_feature (1)..(879): WCRW transcript 454run3_isotig15710
gtgacaacagaaaaatatagaaaatcatcctctgtgtttccgttttgaacttaacttgtatttagtttaaaaaataatcatgtctagaggaagcagtgcaggttttgaccgacacataacaattttctcgcccgaaggccgactctatcaagtagagtatgcttttaaagccattaaccaagccggccccacttcggtagcagtccgaggagtagatgctgcggcgtgtgtgacccagagaaagatcccggataagctgattgatcccaacacaattacacatctgttccagttaacagaacacactggatgtgtgatgactggcatgattgctgacagcaagtcccaggtgcagagagctagatatgaggctgccgagttcaaatataagtttggatatgagatgccaatcgatgccttgtgtaggagagtatcggatatttcccaggtttatacgcagaatgctgagatgagacctttgggttgctccatgcttctgataggatatgaccaagaaatgggaccatgtgtctacaaagctgaccctgctggctattactgtggctacagagcagtaagtgtaggatccaaacaaactgaagccaacagctacctagagaagaagctaaagaagaaaactgatctgtccaaagatgaagtcatccaattggcaatcagttgtctttcaagtgttttatctgtagattttaaaccaacagaagtcgaagttggggttgttactaaggatgagcccaagtttaggaaattgacggaacaagaaatagatttccatctgacagctattgctgagagggattagatagattttttatattcactctttgtaatgttaagaaatggtcaaattttgagttaagt

SEQ ID NO: 157 - DNA, 451 bp, Diabrotica virgifera
  misc_feature (1)..(451): RNAi target sequence
agataggcggtttggtattcaagcccaaacggtagctacaaatttccaaaaaaatctttgaaatgggaccacatttatatgtgggtcttccaggattagccacagatacccaaacagttatggaaaaactccgtttccgaaaaaacttgtacgaacttaaggaaaatcgaaaaatatctccaaaagtatttgcctctatgatatcaaatatgttgtatgaaaaaagatttgggccattttttgtagaacctgtagtagctggacttctacctaatacttatgaaccctttatctgtaatatggatttaattggttgtataaaccaaccttcagactttgttgttggtggaacagcgtcagcacagttgtatggtatgtgtgaagcactttgggagcctaacctaggacctgaggatctttttgaaaccatctctcaagctctcatcaatgc

SEQ ID NO: 158 - DNA, 22 bp, Artificial Sequence
  primer
  misc_feature (1)..(22): forward primer
agataggcggtttggtattcaa

SEQ ID NO: 159 - DNA, 22 bp, Artificial Sequence
  primer
  misc_feature (1)..(22): reverse primer
gcattgatgagagcttgagaga

SEQ ID NO: 160 - DNA, 829 bp, Diabrotica virgifera
  misc_feature (1)..(829): WCRW transcript ta03399.001_diavv
gtttgcagagagtgtattagtgtattgtattttagtattttacaattctttgaattgcagattatttagcggtttagtacaaaaacctgaagtaaattctataacggaaagtgcttaaattttagtggtaaaatgtccattctagcttacaatggtggtgctatggtggcgatgaagggagaaaactgtgtagcaattgcagcagataggcggtttggtattcaagcccaaacagtagctacaaatttccaaaaaatctttgaaatgggaccacatttatatgtgggtcttccaggattagccacagatacccaaacagttatggaaaaactccgtttccgaaaaaacttgtacgaacttaaggaaaatcgaaaaatatctccaaaagtatttgcctctatgatatcaaatatgttgtatgaaaaaagatttgggccattttttgtagaacctgtagtagctggacttctacctaatacttatgaaccctttatctgtaatatggatttaattggttgtataaaccaaccttcagactttgttgttggtggaacagcgtcagcacagttgtatggtatgtgtgaagcactttgggagcctaacctaggacctgaggatctttttgaaaccatctctcaagctctcatcaatgcctttgacagagatgccatttctggttggggagctacagtgtacatcatagaaaaaaataaggtgactgtaaaaaatttgaagacacgtatggactagttaaatcttgttttttcatttacatttaattgataaaataaatgaaactatttgataaaaaaaaaaaaaaaaaatgcga

SEQ ID NO: 161 - DNA, 530 bp, Diabrotica virgifera
  misc_feature (1)..(530): RNAi target sequence
cttcttcgactaggaggtggaatgccaggtttaactcaggcaccgccgccttctgatgctcctgttgtggatactgccgaacaagtatacatatcctccttagcactattaaaaatgttgaagcacggccgagctggagtacccatggaagtaatgggtcttatgttaggagaattcgtagatgactataccgttcgtgtaatcgatgtatttgctatgcctcagactggtaccggtgtcagtgtagaagctgctgatccagtgtttcaaacaaaaatgcttgacgtgttaagacagactggtaggccagaaatggttgtggggtggtatcattcccatccaggtttcggatgttggttgtctggagtggatatcaacacccagcaaagttttgaggctctcacggaaagagctgtagcagtagtagttgatccaatccagtcagtgaaaggcaaagtcgttattgatgcctttaggttaataaatccgaatatgatggtattgggccaagaacctcgccaaactacatc

SEQ ID NO: 162 - DNA, 22 bp, Artificial Sequence
  primer
  misc_feature (1)..(22): forward primer
cttcttcgactaggaggtggaa

SEQ ID NO: 163 - DNA, 22 bp, Artificial Sequence
  primer
  misc_feature (1)..(22): reverse primer
gatgtagtttggcgaggttctt

SEQ ID NO: 164 - DNA, 1190 bp, Artificial Sequence
  primer
  misc_feature (1)..(1190): WCRW transcript ta04924.001_diavv
tgacagatgacttgtaagggggaaaactaaaagtcatactcacggttgtttttgtaaaacttgtaggtaacgaattttcgtttttagtgaattaacaaaacaacagagtgattttccaacaagaataacttatttattagtttcattaatttgataaacaataaaatggatagacttcttcgactaggaggtggaatgccaggtttaactcaggcaccgccgccttctgatgctcctgttgtggatactgccgaacaagtatacatatcctccttagcactattaaaaatgttgaagcacggccgagctggagtacccatggaagtaatgggtcttatgttaggagaattcgtagatgactataccgttcgtgtaatcgatgtatttgctatgcctcagactggtaccggtgtcagtgtagaagctgttgatccagtgtttcaagcaaaaatgcttgacatgttaagacagactggtaggccagaaatggttgtggggtggtatcattcccatccaggtttcggatgttggttgtctggagtggatatcaacacccagcaaagttttgaggctctctcggaaagagctgtagcagtagtagttgatccaatccagtcagtgaaaggcaaagtcgttattgatgcctttaggttaataaatccgaatatgatggtattgggccaagaacctcgccaaactacatccaacttaggacatctacagaaaccatcagtccaggctttgattcatggtctaaatcggcattactactccatcagtattaattacagaaagaatgaattggaacaaaaaatgctactaaatctccataaaaaatcctggatggatggtctaactttagcagattactctgaaaattgtagtgtgaatgaaaagactgtagctgatatgttagaactagccaagaattacaacaaggcattagaagaggaggagaaaatgactccagaacagctcgctattaaaaatgttggcaaacaagatcctaagaggcatttagaagaaaaggttgatattttgatgaccaataatatcgtccagtgcttgggagctatgctagatacagttgtttttaagtaattgctggatctctttttttactataattgcaacttatttataagatattttttcaataaaaacttttattatgaatttgtgttgcgcag

SEQ ID NO: 165 - DNA, 654 bp, Diabrotica virgifera
  misc_feature (1)..(654): RNAi target sequence
acgatttttgaggttgtcggctagaagttcgcaaagtaaatctaaattccaacaattaaaccgaaatagttctttaaaaaagatgtttcgaaaccaatacgatagtgatgtgacagtgtggagcccccagggccgtctgcatcaggtagaatatgccatggaagcagttaacctaggttcagccacagtgggactgaaaagtaaaactcatgctgtacttatcgctttgaagagggcttcttcagaactgtctgcctaccagaagaaaattatcaacatagacgatcacattggtatcaccatctcgggacttacagctgatgctaggatccttagtagatatatgcgaaacgaatgcttgaattataagtactctttggatacttatatgccattgaataggcttatcagtattttaggtaacaaaatgcagacatgtacccaaagatacgaccgcagaccatttggtgtaggtcttctagtagctggttatgacgaatctggttctcatatctaccaaacgtgcccttctgctaatttctacgattgcaaagctatgtccattggagctcgatcccagagtgccaggacatacttagaaaaacatctggatgaattgccatctagttctttagaagaacttatcaaacatgg

SEQ ID NO: 166 - DNA, 22 bp, Artificial Sequence
  primer
  misc_feature (1)..(22): forward primer
atttttgaggttgtcggctaga

SEQ ID NO: 167 - DNA, 22 bp, Artificial Sequence
  primer
  misc_feature (1)..(22): reverse primer
ccatgtttgataagttcttcta

SEQ ID NO: 168 - DNA, 1142 bp, Diabrotica virgifera
  misc_feature (1)..(1142): WCRW transcript ta04466.001_diavv
gggggagggggacagtcgacgtagcattacaaacgatttttgaggttgtcggctagaagttcgcaaagtaaatctaaattccaacaattaaaccgaaatagttctttaaaaaagatgtttcgaaaccaatacgatagtgatgtgacagtgtggagcccccagggccgtctgcatcaggtagaatatgccatggaagcagttaacctaggttcagccacagtgggactgaaaagtaaaactcatgctgtacttatcgctttgaagagggcttcttcagaactgtctgcctaccagaagaaaattatcaacatagacgatcacattggtatcaccatctcgggacttacagctgatgctaggatccttagtagatatatgcgaaacgaatgcttgaattataagtactctttggatacttatatgccattgaataggcttatcagtattttaggtaacaaaatgcagacatgtacccaaagatacgaccgcagaccatttggtgtaggtcttctagtagctggttatgacgaatctggttctcatatctaccaaacgtgcccttctgctaatttctacgattgcaaagctatgtccattggagctcgatcccagagtgccaggacatacttagaaaaacatctggatgaattgccatctagttctttagaagaacttatcaaacatggattgagggctcttagagatactctacctccagaggttgacctcacaacaaaaaatgtctccataggatacactggcaaaggtcagacctttaaaatcctcgaagaagaagaaacttccccctacttgtcccttattgagggtgaagaacgtagaggaggaggagctgcagctgctgcaattgaggaccttcctgcagatccgttgagagatgatgcgggggacgagcccagggatgcagtcccagctgtggaaacttctgccatggataccacagaatagaaggattagataaagcattaaagccacccgttgatcaggagagtgggtattggaaaggaatattgccgtggctgtctctgttagtctaaaacagactgagacagtcacggcagaacatcgtttgttatatccatactgtattttttaagcttttaataatattttgattaataaat

SEQ ID NO: 169 - DNA, 558 bp, Diabrotica virgifera
  misc_feature (1)..(558): RNAi target sequence
tctgtgcaaaaacaaactgacaagtttgacataagtgacaagtgacatagcggttgtcaacaattttgcaagttgtgtaaattgttaatttgaaggaagcttttaacttttaagtaaaattaactgaaaatggctacagttttgtgtccagaaataccaacgcctggtttttcattcgaaaattgtaaaagaaatgcacttctggaaaataagggccttgctcttccaaaagccactaaaacaggtactacgatcgtaggaatagtctacaaagatggaattattcttggagcagatactagagctacagaagacaccacagttgcagataagaactgtgaaaagattcacttccttgcacccaatatgtattgttgtggtgctggtactgcagcagatacagaaatgaccactcagatggtctctgctaaattagaactccacagattatacacaaaccgagttactagagtgtgtacagcaaaccaattgttaaaacaatatctatttcgctaccagggatatattggggctgctttaatcctgggtggtgttgat

SEQ ID NO: 170 - DNA, 22 bp, Artificial Sequence
  primer
  misc_feature (1)..(22): forward primer
tctgtgcaaaaacaaactgaca

SEQ ID NO: 171 - DNA, 22 bp, Artificial Sequence
  primer
  misc_feature (1)..(22): reverse primer
atcaacaccacccaggattaaa

SEQ ID NO: 172 - DNA, 1578 bp, Diabrotica virgifera
  misc_feature (1)..(1578): WCRW transcript ta04816.001_diavv
gggggttttaaattttcgtagacacgattgttcagtagttcaaaattcattattattaatgttctgtgcaaaaacaaactgacaagtttgacataagtgagaagggacatagcggttgtcaacaattttgcaagttgtgtaaattgttaatttgaaggaagcttttaacttttaagtaaaattaactgaaaatggctacagttttgtgtccagaaataccaacgcctggtttttcattcgaaaattgtaaaagaaatgcacttctggaaaataagggccttgctcttccaaaagccactaaaacaggtactacgatcgtaggaatagtctacaaagatggaattattcttggagcagatactagagctacagaagacaccacagttgcagacaagaactgtgaaaagattcacttccttgcacccaatatgtattgttgtggtgctggtactgcagcagatacagaaatgaccactcagatggtctctgctaaattagaactccacagattatacacaaaccgagttactagagtgtgtacagcaaaccaattgttaaaacaatatctatttcgctaccagggatatattggggctgctttaatcctgggtggtgttgatattgaaggaccacatctatatatgatttatccacatggatccagtgttgatcttccttatgctacaatgggttctggttccttagcagccatatctgtctttgaatcccgctggaagcctcaaatggaagaggaagatggtgtccaactagtaagagatgctattgcagctggtatattcaatgatctaggttcaggttccaatgtagacatctgtgtaataagaaagggttcagtagactacaaacgaacctatgacgaggctaacaaaaagggagttaaacaaggatcttatagatatcaaagaggaaccactgcagtgctcagtacccaggtggtggatgttgaggaagtctcagtgattcccattgaagctgaagaaatggatgttgcttaaatattacagttaaataaatgtcattgtattctttttggtatttactttaatataaaaataaaaaataaatataacagggtttaaatgttcaataatatagtaaattttaatttaaaaaaatattttttcttaacaattacaatagccacatctaaatagatttgctactcaaggatgttgagttaataggatcagtcagtctataaaactaaagaacacatttattttgatcattactttgggtttgatagctgccctttattatatgttaattttaagtacaatctatataaccctaaagttgtttacccaaaaatcatttttatcattttcgagagtaaatattgttcaattttcacatgtcaaaaatattattatattttttactgtgtttaatcttttattacaacccttaaggtactagtacacttcagaagaacaaaaataatcatttttttaaagaattttcctctcagaacctgtattaaaaatgaacacaaaacctgtcacatactaatatctaactctcagagagtacaagaaatatatctcttttcattca

SEQ ID NO: 173 - DNA, 473 bp, Diabrotica virgifera
  misc_feature (1)..(473): RNAi target sequence
aatataccgaaaatgccgagtcaagaattaacaactaataaagtaatagtccaccctttggttcttctaagtgtggtggaccattttaatcgcatgggcaaaatcggcaatcaaaagcgtgttgttggtgttcttcttggctgttggcgtgctaaaggagtcttagatgtttctaacagttttgcagttccttttgacgaagatgacaaggataagtctgtgtggttcttggaccatgattacttagaaaacatgtatggaatgttcaaaaaagttaatgccagggaacgagtagtaggttggtaccacaccggccccaaacttcatcaaaatgatattgccattaatgagttaatcagaaggtattgtccaaattccgttctagttatcatagacgctaaaccaaaagatttaggtttaccaactgaagcttatcaagctgtagaagaagtacacgatgacggttcacctac

SEQ ID NO: 174 - DNA, 22 bp, Artificial Sequence
  primer
  misc_feature (1)..(22): forward primer
aatataccgaaaatgccgagtc

SEQ ID NO: 175 - DNA, 22 bp, Artificial Sequence
  primer
  misc_feature (1)..(22): reverse primer
gtaggtgaaccgtcatcgtgta

SEQ ID NO: 176 - DNA, 1221 bp, Diabrotica virgifera
  misc_feature (1)..(1221): WCRW transcript ta03894.001_diavv
tagttaattgggaacaaagattttattagaataatataccgaaaatgccgagtcaagaattaacaactaataaagtaatagtccaccctttggttcttctaagtgtggtggaccattttaatcgcatgggcaaaatcggcaatcaaaagcgtgttgttggtgttcttcttggctgttggcgtgctaaaggagtcttagatgtttctaacagttttgcagttccttttgacgaagatgacaaggataagtctgtgtggttcttggaccatgattacttagaaaacatgtatggaatgttcaaaaaagttaatgccagggaacgagtagtaggttggtaccacaccggccccaaacttcatcaaaatgatattgccattaatgagttaatcagaaggtattgtccaaattccgttctagttatcatagacgctaaaccaaaagatttaggtttaccaactgaagcttatcaagctgtagaagaagtacacgatgacggttcacctacatctaaaacatttgagcatgttcctagtgaaatcggagctgaggaagctgaagaagttggtgttgaacacttattgagagatattaaagacacaactgttggtactttgtcacagagaataacgaatcagcttttagggttaaaaggtctccattcacagttacgtgatattagggactatttggtacaagtgtgtggtaaccagcttccaatcaatcaccaaatcatctaccaattacaagacatatttaatcttttgcccgatataaatcaggatgcatttaatacatcgttttacgtgaaaaataacgatcaaatgttagtcgtttatctagcagctttagttagatctattgtcgctctacacaatcttattaacaacaaactaacaaatagagacgcggaagaaggaaaaaaggaggatagtaagaaagaaagcaaagataaggacaaggataaagagaaggaaaaggataaagatgctaagaaggacgagaagaaaaagtaattgtgtattatatctggttctacattcaaatgttctcatgttgtgttttcaaacacgatattttaatggtttcaacactttccatttgattcgagtataataatttattttcattttatatgctagtttagtatatacctaacttccttactaagtttgatttatatttaggcaataaagttctttatacaaaaaaaaaaaaaaaaaa

SEQ ID NO: 177 - DNA, 553 bp, Diabrotica virgifera
  misc_feature (1)..(553): RNAi target sequence
ttaattctgctgctcctcctttgtggcataacggccccgtacctggagaattttacaattttcccggcaaacagaccagctattccaaccctataacacatacacagtctcccgttacaacatcaacttctgtattagctattacttacgataaaggagtattgatagccggagatctggttgcttcatacggatctttagctaggtacggaaattgcccgagggttattaaagtcaatcagaatatcatcttgggagccggaggagactatgctgatttccaatacgtcaagagtttcattgagcaaaaaataattgatgaagaatgcattgatgatggactaaaaatgaaaccaaaatcattgtactgctggcttactagagtaatgtaccaacgcaggagtaaattagaccctttttggaataatctggttataggaggaatccaggatggagtcccctttcttggaaccgtagataaattgggaactgcatatacagacaaagttatatgtacaggttatggagcccacatagccttgcctcttctgag

SEQ ID NO: 178 - DNA, 22 bp, Artificial Sequence
  primer
  misc_feature (1)..(22): forward primer
ttaattctgctgctcctccttt

SEQ ID NO: 179 - DNA, 22 bp, Artificial Sequence
  primer
  misc_feature (1)..(22): reverse primer
ctcagaagaggcaaggctatgt

SEQ ID NO: 180 - DNA, 925 bp, Diabrotica virgifera
  misc_feature (1)..(925): WCRW transcript ta01874.001_diavv
aaacaagtcatcgttgaattttctgaagttagagattctttgattacagtttgttgtattaaatagaaaatgtttaattctgctgctcctcctttgtggcataacggccccgtacctggagaattttacaattttcccggcaaacagaccagctattccaaccctataacacatacacagtctcccgttacaacatcaacttctgtattagctattacttacgataaaggagtattgatagccggagatctggttgcttcatacggatctttagctaggtacagaaattgcccgagggttattaaagtcaatcagaatatcatcttgggagccggaggagactatgctgatttccaatacgtcaagagtttcattgagcaaaaaataattgatgaagaatgcattgatgatggactaaaaatgaaaccaaaatcattgtactgctggcttactagagtaatgtaccaacgcaggagtaaattagaccctttttggaataatctggttataggaggaatccaggatggagtcccctttcttggaaccgtagataaattgggaactgcatatacagacaaagttatatgtacaggttatggagcccacatagccttgcctcttctgagagactctttagataaaaatggagctcttaacttggccgatgccaaaactctgattcacaaatgcatggaagtattgttctatagagatgccagaagttttcctaaatatcagcttggtgttattgataaagatgatggtgttagtattgaggggcctatttcagtcgaagagaactggagcattgcccatatgacataatttttcttaatttcgtttattttgtattgaaactatattatacattcatggaagtctgtgtgaataaatttttgataaaactaaaaaaaaaaaaaaaaaa

SEQ ID NO: 181 - DNA, 420 bp, Diabrotica virgifera
  misc_feature (1)..(420): RNAi target sequence
acaagcaatggcgaaagtaaatgaagtggctaatttgtacaagcagttaaaatcagaatggaataccaacaacccaaatttaagtaaatgtgaaaaactactctcaactcttaagcttgagctcaccaatctaatgtttctgccgattaccacatctactgcgtccaaacaagaactacttctagccagagatgttctagagataggagtccaatggagtatagcagccaatgatattacatcttttgaaagatacatggcacaattaaaatgttattacttcgattataacaaccaactaccagaatcaccatttaagtaccaactgcttggattaaacttgttattcctgctgtcacaaaaccgagtagcagaatttcacactgaattggaacttttacctgccgatcatattcagaa

SEQ ID NO: 182 - DNA, 22 bp, Artificial Sequence
  primer
  misc_feature (1)..(22): forward primer
acaagcaatggcgaaagtaaat

SEQ ID NO: 183 - DNA, 22 bp, Artificial Sequence
  primer
  misc_feature (1)..(22)
ttctgaatatgatcggcaggta

SEQ ID NO: 184 - DNA, 1040 bp, Diabrotica virgifera
  misc_feature (1)..(1040): WCRW transcript ta06150.001_diavv
gacagctgtcacaaatattcaacggattccatttgttcctagtcatagtgtaatttgtggaagaattttgttcgagtatttatagctaaaattctgaagatttaattaattaaacaagcaatggcgaaagtaaatgaagtggctaatttgtacaagcagttaaaatcagaatggaataccaacaacccaaatttaagtaaatgtgaaaaactactctcaactcttaagcttgagctcaccaatctaatgtttctgccgattaccacatctactgcgtccaaacaagaactacttctagccagagatgttctagagataggagtccaatggagtatagcagccaatgatattacatcttttgaaagatacatggcacaattaaaatgttattacttcgattataacaaccaactaccagaatcaccatttaagtaccaactgcttggattaaacttgttattcctgctgtcacaaaaccgagtagcagaatttcacactgaattggaacttttacctgccgatcatattcagaatgatgtgtacatcagacatcccttgtctattgaacaatatttaatggaagggagttataataaaatatttctggctaaaggtaatgtacctgctaagagttataacttctttatggatattttgctggacaccataagagaagaaattgcagactgtttatcagtagcctatgaaaagatctcagtaaaagacgtagccagaatgctgtacctgccaaacgaagaagctgctaaaacatttgccaaaaaggctttccagctcaaaccgtggaagctcaacaatgactttttccactttcttcctgaagagaagacccacgaacccataccctcacaggaactggcacagcaggctatagagtatgccaaggaacttgaaatgattgtctaataggtgtatttaattcttatatttaggatttttttatataaaaatcaatatttaataaacaaacaatttatttgttttgtactttaaaaaaaaaaaaaaaaaaaaaaaaaaatgcg

SEQ ID NO: 185 - DNA, 716 bp, Diabrotica virgifera
  misc_feature (1)..(716): RNAi target sequence
  misc_feature (608)..(608): n can be any nucleotide
  misc_feature (645)..(645): n can be any nucleotide
cattacatagcgctttttgttattgcaaattgtcggcccgagttattttgtacaatggagtgtctacttggtatcaaatttaatgattacgttcttgttgctgcagatatgactgcagcgcaaagcataattgtaatgaaaacagatgaaaacaagcttcataaactttccaataagcttgttatggctgtttctggtgagtctggggatactacacagtttgcagagtatatagcaaaaaatattcaactttacaaaatgaggaatacctatgaattgagtcccaaagaagctgcagcatttactagaagaaatttggcagatgcactcagaagcagaagtgcataccatgtaaaccttcttctagctggatatgatgacaaagaaggtcctcagctatattacatggactacctagcatccatagcaagcgttgattatgctgctcatggttatggaggattcttttcactgtcaattatggatcgtaattatcggcagaaccttagtaaagaagaaggttatgaacttttgaaaaaatgtgtgaaagaagttcagaaaagattgatcatcaatttgcctaactttaaggtgcagtgtgttgatanaaatggcatccaggatatgcctaatatcactgctaangatttggtttaatttagtttgatataagttatgtatttttttttattattaaataaactgaattttcttgt

SEQ ID NO: 186 - DNA, 20 bp, Artificial Sequence
  primer
  misc_feature (1)..(20): forward primer
cattacatagcgctttttgt

SEQ ID NO: 187 - DNA, 20 bp, Artificial Sequence
  primer
  misc_feature (1)..(20): reverse primer
acaagaaaattcagtttatt

SEQ ID NO: 188 - DNA, 872 bp, Diabrotica virgifera
  misc_feature (1)..(872): WCRW transcript ta01941.001_diavv
aaaaatggggggctatcattacatagcgctttttgttattgcaaattgtcggcccgagttattttgtacaatggagtgtctacttggtatcaaatttaatgactacgttcttgttgctgcagatatgactgcagcgcaaagcataattgtaatgaaaacagatgaaaacaagcttcataaactttccaataagcttgttatggctgtttctggtgagtctggggatactacacagtttgcagagtatatagcaaaaaatattcaactttacaaaatgaggaatacctatgaattgagtcccaaagaagctgcagcatttactagaagaaatttggcagatgcactcagaagcagaagtgcataccatgtaaaccttcttctagctggatatgatgacaaagaaggtcctcagctatattacatggactacctagcatccatagcaagcgttgattatgctgctcatggttatggaggattcttttcactgtcaattatggatcgtaattatcggcagaaccttagtaaagaagaaggttacgaacttttgaaaaaatgtgtgaaagaagttcagaaaagattgatcatcaatttgcctaactttaaggtgcagtgtgttgataaaaatggcatccaggatatgcctaatatcactgctaaggatttggtttaatttagtttgatataagttatgtatttttttattattaaataaactgaattttcttgtaaaaaaaaaaaaaaaagtagcatttatttctatattaggacaagaaattagatagggtggtatatgcttgtaacaaaatttactaattatacggtaaacgccaccctactagatacataggaacattgagctattacagtcc

SEQ ID NO: 189 - DNA, 364 bp, Diabrotica virgifera
  misc_feature (1)..(364): RNAi target sequence
  misc_feature (274)..(274): n can be any nucleotide
ttggcatgactgtgcaaatagtcggtccattgtgcatgagtaaagtgattctaaccataacttcaaaacgctttagttttaaatatttgtgaacattaataacagaaacagttcattcaaaataatctataagaatgggcgatacaaaggtagaacctacaaaggtggataaaacaaaggggactgaggacaaaaacaaaaatgaactgtcggaagaagacaaacagcttcaagatgaattaaatttgtgtgttgagaaactccaaggataacnatgaaaagagatacctacttgctttgcaaagctttatcaaatcatattcaaagcctcaactacttcgatgacttctgttcctaaagccgt

SEQ ID NO: 190 - DNA, 22 bp, Artificial Sequence
  primer
  misc_feature (1)..(22): forward primer
ttggcatgactgtgcaaatagt

SEQ ID NO: 191 - DNA, 22 bp, Artificial Sequence
  primer
  misc_feature (1)..(22): reverse primer
acggctttaggaacagaagtca

SEQ ID NO: 192 - DNA, 3066 bp, Diabrotica virgifera
  misc_feature (1)..(3066): WCRW transcript ta44362.001_diavv
attgaatgcttggcatgactgtgcaaatagtcggtccattgtgcatgagtaaagtgattctaaccataacttcaaaacgctttagttttaaatatttgtgaacattaataacagaaacagttcattcaaaataatctataagaatgggcgatacaaaggtagaacctacaaaggggactgaggacaaaaacaaaaatgaactgtcggaagaagacaaacagcttcaagatgaattaaatttgtgtgttgagaaactccaggataacgatgaaaagagatacctacttgctttgcaagctttatcaaatcatattcaagcctcaactacttcgatgacttctgttcctaagccgttaaaatttatgaggccccattacgaaaccatgaagacagtacatgaaaaaattactgatcctgatactaaaaaagtctgtgcagatattatatctgttttagctatgacaatgggagaaggcagagaatgtttgaaataccgtcttctttctaatttggataaaattggcgaatggggacatgaatatgttaggcatttggcaggagagattgcaggagaatgggccgagactgattttatagtgaacactgaaattagggaaaaacttatcttactaacaaaacaaattgtgccatataatatggcacacaatgcagaagcagaagcatgtgacttgcttatggaaattgaaaggcttgatctactagaacagtatgttgatgaaaacatctaccatagagtgtgcttatatctcaccagctgtgtaccctatgtggcagatcctgagaatactactctactgcagactgctcttttactgtttagaaagtttgatcagtatccccaggcactgagattagcaatgcagttaaatgactttggattaattgaagaaatttttgtcaactgcccagattcggacgtacaaaaacaactggcatttatgctaggacgacaacagatatatgttgaaattcctgagcatacgcctgaatacgaagatctaatcgagataatggcaaactgtcatcttaataaccacttcttgaacctcgctcgcgagttggacattatggatcctaaaacccccgaagacgtttacaaatcccatttagaaaatagtcgtcctccatttggtggaaaccaagttgattcagccagacaaaacttagctgccagctttgttaacggttttgttaatgctgcttttggtcaagataagctcttaatggaagatgggaataaatggctttacaaaaacaaagaacatggaatgcttagtgctactgcttctttgggactaattcttttatgggatgtagacggtggtcttactcctatcgataaatacttgtactcttctgaagaccatatcaagtctggcgctttattagcttgtggcattgtaaactgcggtgtcaggaatgaatgtgatcccgcacttgcacttttaagtgattatgttcttcacaacacaaacataatgagaataggagctattgtaggtctaggtttagcgtatgttggttcaaatagggaagcagtattatctctaatcacgcctgtgctatctgaccctaaatcaaatatggaggtcattggaatggcggctctagcatgcggaatgatttctgcaggatctggtaactcacatgtgacaacatcaataatgcaagttcttatggaaaagtccgaaatagaattaaaggacacttacgccagatttttgcctctgggtcttggattgtgtcatttaggtaaacaagaaagcattgacacaattatagcagcattagaagttatacctgaccctttcagatccatggcgactactatggtcgatatttgcgcttatgcaggcacaggaaatgttttaaaagtacaacatttgttacatatatgttcagaacattacgatgctcctgaaactcctgacaaaacttcaaaggacaaagataaaaaagaagcagagaaagaaaaagataaggatctttcagctagacaagctattgcggttttgggtatagctttaattagcatgggagaagacattggtagcgagatggctttccggacatttggtcatttactaagatactgcgaaccagcgatcagacgtgctgttcccttagccctaggcttaatctcagtttcaaatccaaaattaagtattctcgatactttgagtaaattttcacatgatagcgatgctgaagtggctcataatgccatctttgcgatgggtctggtgggagctggtactaacaatgcaaggttagcagctatgctaagacagttagcacagtaccatgccaaagatcccaataatttatttatggttcgcatcgcccagggtctcactcatcttggcaaaggaactttaactctcagtccattccacagtgataggcagctgatgagtccagtagctgtagctggtctaatggcgacactcatcggcttcttggatgttaaaaacattatattggggaagtcacactacttactgtacaccttagcagctgcaatgcaaccaaggatgttagtcacatttgacgatgagctaaatcctctaccagtgcctgtcagagttggattggcagtggatgttgttggccaagcaggaaaaccaaagactataacaggtttccaaacccataccactcctgtgcttctggcttatggtgagcgcgctgagctcgcaactgaagaatacattgcattgacgccaattatggaaggatttgttattttacgaaaaaatcctgaatttaattcataaatatattatttccgtcattgtttatcatgttccgcaattttttgatttaatatacttttttgtattaatcgatatttattaaatattgctcacgttttgattgaaaaccctaattgttcataacctcttcaatatctgtatatttgcattgaaaatatctgaatctgtatattttaagaaaaaatcgcgaatttaattcataaatatagataaaagtatagggacaaaattatggagcccatttctctaaagtggacgattttggaga

SEQ ID NO: 193 - DNA, 358 bp, Diabrotica virgifera
  misc_feature (1)..(358): RNAi target sequence
  misc_feature (267)..(267): n can be any nucleotide
cagcagtggtacagcaatcaaatgtaaacgattatttactaaaaaaacaacaagaaagtactaaagaattaggctcagaatgggccgaacttgaagaacttcataataaaaaattgtggcatcagttgactctaaaattgctgaattttattaagaaaccagaactacagaagaatgataacctcattcaactgtacaataactttattcaaagttttgaaaataaaatcaatcctttgtcattggttgaaattgttgctatagtantccaacaattcaaaaatccaaaagatgctgtcgcttttcttgaaaagactgaacctaaggttaaaattaattcaagatgcccaaaacttgt

SEQ ID NO: 194 - DNA, 21 bp, Artificial Sequence
  primer
  misc_feature (1)..(21): forward primer
cagcagtggtacagcaatcaa

SEQ ID NO: 195 - DNA, 21 bp, Artificial Sequence
  primer
  misc_feature (1)..(21): reverse primer
acaagttttgggcatcttgaa

SEQ ID NO: 196 - DNA, 1241 bp, Diabrotica virgifera
  misc_feature (1)..(1241): WCRW transcript ta04679.001_diavv
taaaagcgaaaatggctgcagcagtggtacagcaatcaaatgtaaacgattatttactaaaaaaacaacaagaaagtcctaaagaattaggctcagaatgggccgaacttgaagaacttcataataaaaaattgtggcatcagttgactctaaaattgctgaattttattaagaaaccagaactacagaagaatgataacctcatacaactgtacaataactttattcaaagttttgaaaataaaatcaatcctttgtcattggttgaaattgttgctatagtagtccaacaattcaaaaatccaaaagatgctgtcgcttttcttgaaaagactgaacctaaggttaaaattaattcagatgcccaaaacttgtgcaaagttttagctgggcagatatatatcgaaaagttgaacgatttagatgctactaaaaagataattgaagaagtggaatctacattggacaatgctgatggtgttactccagttcatggaagattttatttacttgcctcacaatattatagaattcaaggaaaccatgctcaatattataggacagcattgagatatcttggatgcatagagttggatacaataacatcagaagtgaaagtgcaacacgctttctttttgggtttggctgctctattaggcgaaggtgtctataacttaggtgaattactcgcacatcccgttttggagtccctaaaatcaacagaaaatgcgtggttggtagaattgttgtatgcttttaattctggcaatattaaaaagtttgagtccatgaaaccgcagtgggaagctatagcagatcttgcagctgaagaattatttttacgacaaaaaatatccctgttgtgtcttatggagatgacatttaatagaccatcgcacaacaggcaattaacatttgcagaaatcgcaaaagaaacaaaattacctttgaatgaaattgaattattgattatgaaagcgttgtcccaaggactagtcaaaggagccattgatcaggttgccaataccgtaaatatgacctgggttcaacctagagttttggattgtacgcagatttccaacatgattactaggcttaacgattggtgtaaacatgttgataccatggagcaattgctggaagaaaaagctagtgaaatattaacattgtaatttgtaattattaataatttatatattcgtccttaatttttttttaaggttttctcactgataataaaa

SEQ ID NO: 197 - DNA, 410 bp, Diabrotica virgifera
  misc_feature (1)..(410): RNAi target sequence
tggaggtgataacgaggtacaacgtactatgttagaacttatcaatcagttggatggttttgatcctagaggtaacattaaagtacttatggctacaaatcgtccagatactctagatcctgcccttatgagacctggtcgtttggatcgtaaagttgaatttggacttccagaccttgaaggaagaactcatattttcaaaattcatgctaggtccatgtctgttgaaagagatattcgttttgaacttttggctaggttgtgtccaaattccactggagctgaaatcagaagtgtttgtaccgaagctggtatgttcgctataagagcaaggaggaaagtagctaccgaaaaagacttcttagaagctgtaaataaagtaattaagtcatacgccaagttctctgcta

SEQ ID NO: 198 - DNA, 22 bp, Artificial Sequence
  primer
  misc_feature (1)..(22): forward primer
tggaggtgataacgaggtacaa

SEQ ID NO: 199 - DNA, 22 bp, Artificial Sequence
  primer
  misc_feature (1)..(22): reverse primer
tagcagagaacttggcgtatga

SEQ ID NO: 200 - DNA, 1452 bp, Diabrotica virgifera
  misc_feature (1)..(1452): WCRW transcript ta07921.001_diavv
ttatttaaaactaaatctatgaaaaatattgttcttaaaatatttttcatagatttagttttaaataaagacaattaagatgccggaccatttaggagatgatatgcgaaaaataaaagaacagaaagaggagcccgaaaaggaaattaaagccctggatgaaggtgatatagcacttcttaaaacctatggacaagggcaatacacaaagacaattaaaacatgtgaagaagatatccaaacgataatcaaaagagtaaatgaattaactggtataaaagaatctgatactggtttagctccaccagctttatgggatttggcagctgacaaacaaaccttacaaaatgagcaacccttacaagtggcccgttgtacgaaaattatcaacgctgatacagatgatcccaaatacattataaacgttaaacagtttgccaaattcgtagtagatttggcagactctgtggcccctacagacatagaagaaggcatgagagttggagtcgaccgaaataagtatcaaattcatattcctctacctccaaaaattgatcccactgtgactatgatgcaagttgaggagaagcctgatgttacatacagtgatgttggtggctgcaaggaacaaattgaaaagttgagagaagttgttgaaacacctttactccatcctgaaaaatttgtaaaacttggtattgaaccaccaaaaggcgttctcctttttggcccccctggaactggtaaaactctttgtgctagagcagtagccaatagaacagatgcctgctttattcgtgtaattggttctgaactggttcagaagtacgtaggagagggagcaagaatggttagagaacttttcgaaatggctaggtctaagaaggcctgcttgatattctttgatgaaattgatgccattggtggagccagatttgatgatggcgctggaggtgataacgaggtacaacgtactatgttagaacttatcaatcagttggatggttttgatcctagaggtaacattaaagtacttatggctacaaatcgtccagatactctagatcctgcccttatgagacctggtcgtttggatcgtaaagttgaatttggacttccagaccttgaaggaagaactcatattttcaaaattcatgctaggtccatgtctgttgaaagagatattcgttttgaacttttggctaggttgtgtccaaattccactggagctgaaatcagaagtgtttgtaccgaagctggtatgttcgctataagagcaaggaggaaagtagctaccgaaaaagacttcttagaagctgtaaataaagtaattaagtcatacgccaagttctctgctacaccaagatatatgacttacaattaattttaaagattttctaattatcgaattatttaaattgcgtttctaaataaataatccttttttagtgt

SEQ ID NO: 201 - DNA, 458 bp, Diabrotica virgifera
  misc_feature (1)..(458): RNAi target sequence
tctcctgaagggaggttgtatcaggtggagtatgccatggaggctatttctcatgcaggtacttgtctgggcattttagcaaatgatggaattttgttggctgctgagaggcgtaacactaacaaattattagatgaagtttttatttcagaaaaaatatacaaactaaatgatgatatggtttgtagtgtggctggaataacatcagatgctaatgttttaacaaatgaattgagacttataggtcaaagatatttatttcagtatgccgaatctattccttgcgaacagttagtttcctggctttgtgatgtcaagcaggcatacactcagtatggaggtaaacgtccatttggtgtttcaatattatatatgggatgggataaacattatggataccagctatatcagtcagatcccagtggcaactattctggttggaaagctacctgcatagg

SEQ ID NO: 202 - DNA, 22 bp, Artificial Sequence
  primer
  misc_feature (1)..(22): forward primer
tctcctgaagggaggttgtatc

SEQ ID NO: 203 - DNA, 22 bp, Artificial Sequence
  primer
  misc_feature (1)..(22): reverse primer
cctatgcaggtagctttccaac

SEQ ID NO: 204 - DNA, 892 bp, Diabrotica virgifera
  misc_feature (1)..(892): WCRW transcript ta04612.001_diavv
tttaaattttctaggctcagtatttttagctatattgagtatcaactaaaactatggctcgtcgatatgataccagaaccacaatattctctcctgaagggaggttgtatcaggtggagtatgccatggaggctatttctcatgcaggtacttgtctgggcattttagcaaatgatggaattttgttggctgctgagaggcgtaacactaacaaattattagatgaagtttttatttcagaaaaaatatacaaactaaatgatgatatggtttgtagtgtggctggaataacatcagatgctaatgttttaacaaatgaattgagacttataggtcaaagatatttatttcagtatgccgaatctattccttgcgaacagttagtttcctggctttgtgatgtcaagcaggcatacactcagtatggaggtaaacgtccatttggtgtttcaatattatatatgggatgggataagcattatggataccagctatatcagtcagatcccagtggcaactattctggttggaaagctacctgcataggcaacaacagttcagcagcaatttcaagtttgaaacaagaatataaagaaggtcaaatgactttgaaggatgcaaagacgttagcagtaaaggttctggcaaaaacattggatatggcaaaactaacttcagaaaaagtggaaatggctacacttacccgcaaaaatgataaaaccatgattaaaattttaagcggcaaggaagtagaagaactgatttcagagtatgaaaaaagtgaagctgccgcagaagctagcaaaaaagagcagaaggcatcagcttaattacatttatttggttttgtttaggttcactaagtatgtcattgtcacaatatgaataaatg

SEQ ID NO: 205 - DNA, 453 bp, Diabrotica virgifera
  misc_feature (1)..(453): RNAi target sequence
tgcagcttatagtggctgaaaagagtcaaaatcttagacgtttgcaagctcagagaaatgaactcaatgccaaagttcgtatgttgagagaagaactgatgttacttcaagagcaaggaagctatgtcggagaagttgtaaagcccatggataagaaaaaagtccttgtgaaagttcatccagaaggaaaatttgtagttgacattgacaaaaacatagacataaatgatgttactccaaattgtcgagtagccctcagaaatgaatcttacacattgcacaaaatacttccaaacaaggttgatcctttagtttccttgatgatggtggagaaagtccctgattcaacttatgaaatggtaggaggacttgacaagcaaattaaagaaatcaaagaagtaattgaacttccagttaaacatccagaactttttgatgctcttggtattgcac

SEQ ID NO: 206 - DNA, 22 bp, Artificial Sequence
  primer
  misc_feature (1)..(22): forward primer
tgcagcttatagtggctgaaaa

SEQ ID NO: 207 - DNA, 22 bp, Artificial Sequence
  primer
  misc_feature (1)..(22): reverse primer
gtgcaataccaagagcatcaaa

SEQ ID NO: 208 - DNA, 1322 bp, Diabrotica virgifera
  misc_feature (1)..(1322): WCRW transcript ta01297.001_diavv
aaactcccggagtgcaaaaaactatcaagaatgacggtaattaacaagatggaggtggacggaggtccgaagggagaaggttttcggtcatattatattacaaagattgaagaattgcagcttatagtggccgaaaagagtcaaaatcttagacgtttgcaagctcagagaaatgaactcaatgccaaagttcgtatgttgagagaagaactgatgttacttcaagagcaaggaagctatgtcggagaagttgtaaagcccatggataagaaaaaagtccttgtgaaagttcatccagaaggaaaatttgtagttgacattgacaaaaacatagacataaatgatgttactccaaattgtcgagtagccctcagaaatgaatcttacacattgcacaaaatacttccaaacaaggttgatcctttagtttccttgatgatggtggagaaagtccctgattcaacttatgaaatggtaggaggacttgacaagcaaattaaagaaatcaaagaagtaattgaacttccagttaaacatccagaactttttgatgctcttggtattgcacaacctaagggtgtgttgttatatggaccaccaggcactggaaaaactcttctggcacgtgctgtagctcatcacacagagtgtacatttattagagtatctggttcagaattggtacagaaattcataggagaaggatcccgtatggtaagagaactcttcgtaatggccagagaacatgctccttcaattattttcatggatgaaattgattccattggatcttcccgtattgaatcaggatctggtggtgattctgaagtccaaagaaccatgttggaacttctaaatcaattggatggttttgaagctaccaaaaacatcaaagtaattatggctaccaacagaattgatattttggatcccgctttactcagaccaggaagaattgacagaaaaattgaattccccccaccgaacgaagaagctagattggacatcttaaagattcactccagaaaaatgaacctcacaagaggaataaatctgagaaaaatagctgagttgatgccaggtgctagtggagctgaagttaagggtgtgtgtacggaagctggtatgtatgcactaagagaacgaagggtgcatgttactcaagaagattttgaaatggccgtcgccaaagttatgcagaaggattctgagaagaatatgtccatcaagaagttgtggaaataagttttttgtactacttaatatgtgattattttttaagaaataaaatatagcgaatagataaaaaaaaaaaaaaaaaa

SEQ ID NO: 209 - DNA, 488 bp, Diabrotica virgifera
  misc_feature (1)..(488): RNAi target sequence
gttaagatgccggaccatttaggagatgatatgcgaaaaataaaagaacagaaagaggagcccgaaaaggaaattaaagccctggatgaaggtgatatagcacttcttaaaacctatggacaagggcaatacacaaagacaattaaaacatgtgaagaagatatccaaacgataatcaaaagagtaaatgaattaactggtataaaagaatctgatactggtttagctccaccagctttatgggatttggcagctgacaaacaaaccttacaaaatgagcaacccttacaagtggcccgttgtacgaaaattatcaatgctgatacagatgatcccaaatacattataaacgttaaacagtttgccaaattcgtagtagatttggcagactctgtggcccctactgacatagaagaaggcatgagagttggagtcgaccgaaataagtatcaaattcatattcctctacctccaaaaattgatcccac

SEQ ID NO: 210 - DNA, 22 bp, Artificial Sequence
  primer
gttaagatgccggaccatttag

SEQ ID NO: 211 - DNA, 22 bp, Artificial Sequence
  primer
  misc_feature (1)..(22): reverse primer
gtgggatcaatttttggaggta

SEQ ID NO: 212 - DNA, 1425 bp, Diabrotica virgifera
  misc_feature (1)..(1425): WCRW transcript 454run3_isotig16670
aaaatttgcttgtaatcttgcacaaaaatattttaagaacaatatttttcatagatttagttttaaataaagacaattaagatgccggaccatttaggagatgatatgcgaaaaataaaagaacagaaagaggagcccgaaaaggaaattaaagccctggatgaaggtgatatagcacttcttaaaacctatggacaagggcaatacacaaagacaattaaaacatgtgaagaagatatccaaacgataatcaaaagagtaaatgaattaactggtataaaagaatctgatactggtttagctccaccagctttatgggatttggcagctgacaaacaaaccttacaaaatgagcaacccttacaagtggcccgttgtacgaaaattatcaacgctgatacagatgatcccaaatacattataaacgttaaacagtttgccaaattcgtagtagatttggcagactctgtggcccctacagacatagaagaaggcatgagagttggagtcgaccgaaataagtatcaaattcatattcctctacctccaaaaattgatcccactgtgactatgatgcaagttgaggagaagcctgatgttacatacagtgatgttggtggctgcaaggaacaaattgaaaagttgagagaagttgttgaaacacctttactccatcctgaaaaatttgtaaaacttggtattgaaccaccaaaaggcgttctcctttttggcccccctggaactggtaaaactctttgtgctagagcagtagccaatagaacagatgcctgctttattcgtgtaattggttctgaactggttcagaagtacgtaggagagggagcaagaatggttagagaacttttcgaaatggctaggtctaagaaggcctgcttgatattctttgatgaaattgatgccattggtggagccagatttgatgatggcgctggaggtgataacgaggtacaacgtactatgttagaacttatcaatcagttggatggttttgatcctagaggtaacattaaagtacttatggctacaaatcgtccagatactctagatcctgcccttatgagacctggtcgtttggatcgtaaagttgaatttggacttccagaccttgaaggaagaactcatattttcaaaattcatgctaggtccatgtctgttgaaagagatattcgttttgaacttttggctaggttgtgtccaaattccactggagctgaaatcagaagtgtttgtaccgaagctggtatgttcgctataagagcaaggaggaaagtagctaccgaaaaagacttcttagaagctgtaaataaagtaattaagtcatacgccaagttctctgctacaccaagatatatgacttacaattaattttaaagattttctaattatcgaattatttaaattgcg

SEQ ID NO: 213 - DNA, 553 bp, Diabrotica virgifera
  misc_feature (1)..(553): RNAi target sequence
  misc_feature (485)..(485): n can be any nucleotide
caaaggaactcgcagagcttataaaggccaccaggccttttttgagtttaataagcaaagcaaaagctgctaaattggtaaggtctctagttgactacttcctagatttagaagctggtattggtatcgaagtacaactctgcaaagaatgtatagaatgggcaaaggaagagagaagaacttttctacgtcagtcccttgaagccaggctgattgctctttattttgacactggaatgtacagcgaagcgctacaactggaatcgaccttactgaaagagttaaaaaagttggatgacaaaaatttgttggtggaagtacaactacttgaaagcaaaacatatcatgctttaagtaatttaccgaaggctagagctgcactaacttcagcacgaaccacagctaacgctatctattgccctccaaagatgcaggcagctttagatttacaatccggagtattacacgctgcagatgagaagganttcaaaacagcttattcttatttttatgaagcttttgaaggttttgatagtgttgaatccccaaaagc

SEQ ID NO: 214 - DNA, 22 bp, Artificial Sequence
  primer
  misc_feature (1)..(22): forward primer
caaaggaactcgcagagcttat

SEQ ID NO: 215 - DNA, 22 bp, Artificial Sequence
  primer
  misc_feature (1)..(22): reverse primer
gcttttggggattcaacactat

SEQ ID NO: 216 - DNA, 1860 bp, Diabrotica virgifera
  misc_feature (1)..(1860): WCRW transcript ta03917.001_diavv
gggtcagatccgatcatattaacgtgaaaagcatatttatgacagacaaattaatggaagtttagtagtgagtagtgaaaaaatatggccggagcaatgttatttgaaagagccccgtctgtttcttctcaacacgagaagcttttaaaattatccagggattcagatgatgaagatcaaaatattgtcaataaagaacaagacatccttaatcttggtgagaaatataaaaaggagggcaaggcaaaggaactcgcagagcttataaaggccaccaggccttttttgagtttaataagcaaagcaaaagctgctaaattggtaaggtctctagttgactacttcctagatttagaagctggtattggtatcgaagtacaactctgcaaagaatgtatagaatgggcaaaggaagagagaagaacttttctacgtcagtcccttgaagccaggctgattgctctttattttgacactggaatgtacagcgaagcgctacaactggaatcgaccttactgaaagagttaaaaaagttggatgacaaaaatttgttggtggaagtacaactacttgaaagcaaaacatatcatgctttaagtaatttaccgaaggctagagctgcactaacttcagcacgaaccacagctaacgctatctattgccctccaaagatgcaggcagctttagatttacaatccggagtattacacgctgcagatgagaaggatttcaaaacagcttattcttatttttatgaagcttttgaaggttttgatagtgttgaatccccaaaagccctcacagcccttaaatacatgcttttgtcaaaaatcatgataaacagtccggaagacgtccaacaaatcgttagtggtaaattggcctttaaatacgctggtcaagatatagaggctatgaaatcagttgcacaggctgcacacaaaagatcactagcagatttccaacaagctgtaaaacagtttaaacatgaattagaagatgatgttattgttagagcacatttaggaacgttgtatgacaatatgttggagcagaacctttgcagaattatcgaaccatattctagggtacaagtagagtatgtagcaaaaaccataaaactcccagtactacaagtagagaagaaattgtcacagatgattttagatgccaagtttcatggaattttggaccaaggcgaaggtgtcctcatagtattcgaagaaagtgcagtagacaaaacatatgaaatggccctagaaacgatccagagtatgagcaaagtagtagatactctttatcaaaaagcaaagaaattgtcataggtataatgtagccgagaatgttatgaaaataataaaatgactgtaaatttttcagaactagattttttgtagacactgtgtttatataacctatttaatttgcttttgttaattcttgtctttttaaggattcttataactcatagttttcggagcttgagggttttggatgtgatggagtttttttgttaatacagtatagatattttttaagatacttaaagcttatctaaatctaggaaaatatcatgcctaaagtcataagagattcataatccatatgtaactaactcatagaactattttctttataatattttttacaagcaatgaaataaaagcctcaaaaaatagactgaactttagagactttaggcattgagttttggtctttattgggaaaatattaatacaaaagttctataagaaatatctttgtatggtttattaattcattttttaacctgccaagacattgtgatctctattactatcagtgtcattggcttgttttcatacaatttttccctaata

SEQ ID NO: 217 - DNA, 469 bp, Diabrotica virgifera
  misc_feature (1)..(469): RNAi target sequence
  misc_feature (294)..(294): n can be any nucleotide
  misc_feature (295)..(295): n can be any nucleotide
  misc_feature (296)..(296): n can be any nucleotide
  misc_feature (385)..(385): n can be any nucleotide
  misc_feature (386)..(386): n can be any nucleotide
gtcaataccttttcacccgaaggaagattatttcaagtacaatatgccatacaagctattaagttaggatctaccgctattggaatatgcaccagtggtggagtagtgcttgctgtacaaaaacgcattacttccccattaatggaacctactacgattgagaaaattgtagaagttgacaaacatattggatgtgcggtttcaggacttatggcagattcaaggactatgatagatagagctcgtgtggaatgtcacaatcattggtttgtctacaatgaaaatataagtgtnnnatcctgtgcacaaggtgtatcaaatttggctattcagttcggatattctgatgaagatggtgcagccatgtctagaccttttggagtannaattttgtttgctggtatagatgaaaaaggacctcagttgtaccatatggatccatcaagaacatttgttcagtttgacgcaa

SEQ ID NO: 218 - DNA, 22 bp, Artificial Sequence
  primer
  misc_feature (1)..(22): forward primer
gtcaataccttttcacccgaag

SEQ ID NO: 219 - DNA, 21 bp, Artificial Sequence
  primer
  misc_feature (1)..(21): reverse primer
ttgcgtcaaactgaacaaatg

SEQ ID NO: 220 - DNA, 850 bp, Diabrotica virgifera
  misc_feature (1)..(850): WCRW transcript ta09615.001_diavv
gctattacaagtttcttttgtataagttttataaatattgttaatcgttaacatagtcctgtttacaaaatgtttcttacaagaagtgaatacgataggggagtcaataccttttcacccgaaggaagattatttcaagtagaatatgccatagaagctattaagttaggatctaccgctattggaatatgcaccagtggtggagtagtgcttgctgtagaaaaacgcattacttccccattaatggaacctactacgattgagaaaattgtagaagttgacaaacatattggatgtgcggtttcaggacttatggcagattcaaggactatgatagatagagctcgtgtggaatgtcagaatcattggtttgtctacaatgaaaatataagtgtagaatcctgtgcacaaggtgtatcaaatttggctattcagttcggagattctgatgaagatggtgcagccatgtctagaccttttggagtagcaattttgtttgctggtatagatgaaaaaggacctcagttgtaccatatggatccatcaggaacatttgttcagtttgacgcaaaggcgataggatcaggatccgagggtgcacagcaaagtttacaggaggcatatcatcgcagtatgaccctggaagaagctaccacaactgctttaacaattctaaaacaagttatggaagaaaagttgaattcttcaaatgttgaggttatgactatgactccaaaagatatgttccacatgttcacaaaggaacaagtggaagaggtaattgctaaattgtcttaacttaggaagtaagctaaattttgaaaagggttaattttatataagttttttt

SEQ ID NO: 221 - DNA, 404 bp, Diabrotica virgifera
  misc_feature (1)..(404): RNAi target sequence
  misc_feature (300)..(300): n can be any nucleotide
  misc_feature (301)..(301): n can be any nucleotide
  misc_feature (302)..(302): n can be any nucleotide
  misc_feature (338)..(338): n can be any nucleotide
  misc_feature (339)..(339): n can be any nucleotide
  misc_feature (340)..(340): n can be any nucleotide
  misc_feature (341)..(341): n can be any nucleotide
ttcggaagtaaaacaagtgctgcaggatgtggatactgaagatttgtacactaaatataaaaaacttcaacaacagttggagttcttggaggttcaagaagagtacattaaagatgagcaaaggaatctcaaaaaggagtatttacatgctcaggaagaagtgaagcgtatccagtctgtcccgcttgttattggacagtttttagaagctgtagatcaaaacactggcattgttggctcaactacaggttcaaattattatgttagaatcttatcaacaattgatagagaactcttaannnccttctgctagtgttgctcttcataaacacagcaannnncttagtagatgtcctaccaccagaggcagattcttcaataagcatgctccaggctgatgaaaa

SEQ ID NO: 222 - DNA, 22 bp, Artificial Sequence
  primer
  misc_feature (1)..(22): forward primer
ttcggaagtaaaacaagtgctg

SEQ ID NO: 223 - DNA, 20 bp, Artificial Sequence
  primer
  misc_feature (1)..(20): reverse primer
ttttcatcagcctggagcat

SEQ ID NO: 224 - DNA, 1364 bp, Diabrotica virgifera
  misc_feature (1)..(1364): WCRW transcript ta03370.001_diavv
aaaaaagtcaaaatttgaagaagaaaacaattttacaagtcatcaaccatggaggctatggatattgttataccagaaaaagaagaaggtagtccttcggaagtaaaacaagtgctgcaggatgtggatactgaagatttgtacactaaatataaaaaacttcaacaacagttggagttcttggaggttcaagaagagtacattaaagatgagcaaaggaatctcaaaaaggagtatttacatgctcaggaagaagtgaagcgtatccagtctgtcccgcttgttattggacagtttttagaagctgtagatcaaaacactggcattgttggctcaactacaggttcaaattattatgttagaatcttatcaacaattgatagagaactcttaaaaccttctgctagtgttgctcttcataaacacagcaatgccttagtagatgtcctaccaccagaggcagattcttcaataagcatgctccaggctgatgaaaaaccagatgttcaatacagtgacattggaggtatggatatgcagaaacaagaaattagggaagctgtagagttacctttgactcacttcgaattgtataaacagattggtattgatccccccagaggtgtgttgatgtatggacctcctggatgcgggaagactatgttggccaaagctgttgctcatcatactacagctgcctttattcgtgtagtcggatcagaattcgtacagaaatatcttggtgaaggtcctcgaatggttagagacgtgttccgtctagcaaaagaaaattctccagcaatcatctttattgatgaaattgatgcaatcgctaccaaacgttttgatgcccagacaggtgctgatcgtgaagtccagagaattttattggaactgcttaaccagatggatggttttgatcagacaacaaatgttaaggttatcatggcaactaacagagctgatacattagatcctgcacttctgagacctggtcgtctggacagaaaaatcgaatttcctttaccagatagaagacaaaagcgtttgattttcagcactatcacatctaaaatgaatttgtcagaggaggtcgacttggaggactatgtagctagaccagacagaatatcaggagcagacataaacgccatctgccaggaagccggtatgcatgccgtccgagaaaaccgttacatcgttttacctaaagatttcgagaagggttataagaataacattaagaaggatgagagcgagcacgagttttacaaatagtttatttatattttttattattactaatctaataaagacttgtaaaatgtatttgatgtcattgaatcaagtttacattaaaaaaa

SEQ ID NO: 225 - DNA, 455 bp, Diabrotica virgifera
  misc_feature (1)..(455): RNAi target sequence
cggaattaaatagtgcccaagatgaatatcacatctgcagcgggaattatttccctcttggatgaaccaagaccagaattaaaagtatttgcactgaagaaactagattccatagtgggtgagttttggccggagatctcagaagctatcgaaaaaatcgaaattttgcatgaagacaaagttttccagcaacaccagttagctgcacttgtggcaagtaaggtatattaccatttaggcgcttttgaagactctttaacttatgctcttggtgcgggtgatctctttgatgtcaatgcccggagtgagtatgtagaaactattctagctaaatgtatcgactattacactcagcaacgtattgctgtagctgaaggattggcagatgccaaacccatagactctcgccttgaagctattgttaatcgaatgtttcagaggtgtcttgatgatgg

SEQ ID NO: 226 - DNA, 22 bp, Artificial Sequence
  primer
  misc_feature (1)..(22): forward primer
cggaattaaatagtgcccaaga

SEQ ID NO: 227 - DNA, 22 bp, Artificial Sequence
  primer
  misc_feature (1)..(22): reverse primer
ccatcatcaagacacctctgaa

SEQ ID NO: 228 - DNA, 3242 bp, Diabrotica virgifera
  misc_feature (1)..(3242): WCRW transcript ta00483.001_diavv
tgaatatccacatcaaaaattgcattcattcaatgactgtgttgtttttccgacgtgaaagtttaaaaattacatttttcggaattaaatagtgcccaagatgaatatcacatctgcagcgggaattatttccctcttggatgaaccaagaccagaattaaaagtatttgcactgaagaaactagattccatagtgggtgagttttggccggagatctcagaagctatcgaaaaaatcgaaattttgcatgaagacaaagttttccagcaacaccagttagctgcacttgtggcaagtaaggtatattaccatttaggcgcttttgaagactctttaacttatgctcttggtgcgggtgatctctttgatgtcaatgcccggagtgagtatgtagaaactattctagctaaatgtatcgactattacactcagcaacgtattgctgtagctgaaggattggcagatgccaaacccatagactctcgccttgaagctattgttaatcgaatgtttcagaggtgtcttgatgatggtcaatatcgtcaagctatgggcctggctctagaaaccagacgaatggatatctttgagtcatctattactcagtctgatgatattatcagcatgttgacttatgcatttcaagtagcgatgagtttgattcaaaatcgagcatttagaaacactgttttgagatctcttgttggactttatagaggactggttacacctgattacgttaatatgtgccagtgcttaattttcctcgatgatccattgtctgtggctgaaattttagacaggcttgtaactggcaaggaggatactgaacttatggcatatcaaattgcttttgatctctatgagtcagctactcaacagtttttggaaagagtattagttgcattaagagccacagcaccagttccatctttgctggaagaaaaagcaaagccaaagccttctggtgaaggagagggtgctatgtcaaccgagactggagaaccatctacagaaacaaaagaagaaaaattaaaagaagaaaaatctctggatagtttgtctgatcaggataaggaacatcagaaaagaattgagaaacttcatactatactctcaggggaggtctctatagaactgcaccttcaattcctcatcaggtcaaatcatgctgatctactgattcttaaacaaacaaaagagactgtcagagttagtatttgccacactgctactgtaatcgcaaacgcatttatgcatagtggtactactagcgatcaatttttaagagataacttagaatggttagccagagcaacgaattgggccaaacttacagccacagcctcgctaggagttattcatagaggccatgaacaagaagcattaacactaatgcaaagttacttgccgaaagaagttggacccagctcaggttattccgaagggggcggcctttatgctcttggtcttatacatgccaaccatggtacaaatatcattgattaccttcttggacaacttaaggatgcacagaatgagatggtgagacatggaggttgtcttggtctaggtttggctgctatgggcactcatagacaggatgtttatgaacaactcaaattcaatttataccaagatgatgccaatactggtgaagcagctggtattgcaatgggaatggtaatgttgggttcaagtaattctaccacaattatggatatggttgcatacgcacaagagagtcaacatgagaaaattcttagaggcttagctgttggtattagtttttccatgtatggtagattagaagaagcagatccactgattcaacaacttacctctgataaagatcctatcctcagaagatcaggaatgtatactttgggtatggcatattgtggtactggacacaaccaagcaattagaaaactacttcatgtagctgtgtcagatgtcaacgatgatgttagaagagctgcagttacagctttaggttttctgttattcagaactcctgaacaatgtcctagtgtagtatcccttctagctgagagttacaatccacatgtacgttatggagctgctatggctcttggtattgcatgtgcaggaactggtctacgtgaagctatagctcttctcgaacctatggttatgtttgatcctgtaaacttcgtaagacagggtgctctcattgcttctgctatgattttaattcaacagactgaacaaacttgccccaaagtcacattcttcagacagacatatgctcaagtcatttccaacaaacacgaagatgtgatggccaagtttggagctatcttagctcaaggaatcatcgatgcaggtggaagaaatgtaactttgtcgctacagtccagaactggccacacaaatatgttagctgtagttggtacactggtgttcactcagtactggtactggttccctctatcacattgtttagctttagcattcactccaacatgtgtgattggtcttaatgcacaattgaagatgcccaaattagacttcaaatccaatgccaaacctagtctatatgcttatccagctccaatggaagaaaagaaaagagaagaaagagaaaaggtaactactgccgttttaagtattgctgcccgccaacgtagaagagaccatgaaagaaagcatcgtgacgaaaagatggaagtagatgaagacaaagatgacaagaaaacagaaaaagaagacaaggagaagaagtctgaagagaaagataaaaaggatgaaaagaaagctgatgacaaagataaagataaaaaagcagatgacaagaaagcatctacttctactggcgatgataagaagaaggatgaaaaggaagaaaagaagaaagaacctgaaccaaacttcgaagttttacagaatcctgctagagttatgaggcaacaattaaaggtgattacacttaatgatagcaatcaacatgtttcgatgaaagatgtttctattggaggaataatcatggtgagaaatttgaagcctggagatgaggaactggttgaacctgttgcagcttttggtcccaagggcgaggatgaaaaggaaccagaacctccagagccgtttgaatggacagaagattagatatcatcattaacatttttataatttttcatttaatttactataaatagatgtaattatacgaaaaacgacttttgttaacatttaatattaaattattagtttagcg

SEQ ID NO: 229 - DNA, 701 bp, Diabrotica virgifera
  misc_feature (1)..(701): RNAi target sequence
agctcgcttttatatgagatccgcaacgttcataggcatttcatctatctttgtattatagaactgttcgatatccttaagcgtgcgtttatcatcgtccgttacgaaatttattgctacacccttacgaccaaatcgaccacctcgaccaatcctgtgaatgtaattttctctattagaaggcaaatcataattaataactagggaaacttgctgtacatctatacctctcgctaacagatcagtggttattaaaaccctagatgatcctgttctgaactgacgcataataacgtcacgctctctttgttccatatcaccatgcatagcggaaacagtgaagtctctcttgtgcatgttttctgttaaccaatcgaccttgcgacgggtattgcaaaagattacagcctgcgtaatcgaaagagtatcatagagatcacataatgtctctaatttccaatcttctttttctacatatacataaaattgtttaataccttctaaggtaagttcctcttttttgacaagtatccgaacaggactcctcataaaggattttgtcacgtctagcacatcgtttggcatggtagccgaaagtaaaattacctgtacgtcagtgttcaacattttgaacacgtcatgaatttgatctttaaaaccccttgacaacatttcatcggcttcatccaaaacaaacattt

SEQ ID NO: 230 - DNA, 27 bp, Artificial Sequence
  primer
  misc_feature (1)..(27): forward primer
agctcgcttttatatgagatccgcaac

SEQ ID NO: 231 - DNA, 28 bp, Artificial Sequence
  primer
  misc_feature (1)..(28): reverse primer
aaatgtttgttttggatgaagccgatga

SEQ ID NO: 232 - DNA, 2338 bp, Diabrotica virgifera
  misc_feature (1)..(2338): WCRW transcript ta03651.003_diavv
aaacgaccacagacagactcactttcaggtaaaaaaatcctaacttatttgttaccacaagttagaagtggttaaaagcatcctagaagccactaagtgaattgcaatacctgggcggagcgacagtattcctatcacttcaaacttcaattcagggggcttttccgtttagctatacgcgaagtagacatgtctatgccagatcgtcgtgaagagtgggacaagaatggcccagctaatgaagacagccagccccaaggctatgacggcccaccaggtatggagcctgatggcattattgaatccaactgggaagaggtggtcgataatttcgacgacatgaacctaaaagaggaacttttaagaggaatttatgcctatggttttgaaaaaccttctgctatccaacagagagccatcattccttgtgtaaagggacacgatgttattgctcaggctcagtcaggtactggtaagactgcaacattctccatctctattttacaacaaattgacacgtcagtgagggagtgccaagctcttatattggcaccaactcgtgaattggctcaacagatccaaaaagtagtaattgccctaggagatttcatgtcagcgcagtgtcatgcatgtattggtggtaccaatgtacgagaagacataagaaaacttgaaactggcgtacatgttgttgttggtacacctggtagagtttacgatatgataacgaggagagccctaaggccgactcatattaaaatgtttgttttggatgaggctgatgaaatgttgtcaaggggttttaaagatcaaattcatgacgtgttcaaaatgttgaacactgacgtacaggtaattttactttcggctaccatgccaaacgatgtgctagacgtgacaaaatcctttatgaggagtcctgttcggatacttgtcaaaaaagaggaacttaccttagaaggtattaaacaattttatgtatatgtagaaaaagaagattggaaattagagacattatgtgatctctatgatactctttcgattacgcaggctgtaatcttttgcaatacccgtcgcaaggtcgattggttgacagaaaacatgcacaagagagacttcactgtttccgctatgcatggtgatatggaacaaagagagcgtgacgttattatgcgtcagttcagaacaggatcatctagggttttaataaccactgatctgttagcgagaggtatagatgtacaacaagtttccctagttattaattatgatttgccttctaatagagaaaattacattcacaggattggtcgaggtggtcgatttggtcgtaagggtgtagcaataaatttcgtaacggacgatgataaacgcacgcttaaggatatcgaacagttctataatacaaagatagatgaaatgcctatgaacgttgcggatctcatataaaagcgagctaataaagagtgttggtgtgttctacgacgtctcctgaagtatctttggtgtgagtattagctttctatgctaaatctgctgcgacatatatatgcgaatattgtgcgctgcgccccatcacgtttctttaggacaacgccgttcgaggcacaatcatccacgaactctctgagtgtcaatttttaaatatatttaattgtttcggtttaatctctagtgtatttttaattttttgatatacatatagttagtgtttattatcattcgggagacgtgtggctgtatggaggcccgaggtcccctcgtttcgaggggtaccgacggtcgtaggcgtgttgtgatttgctccacacagttcgttcgtctctgtaagggtttagttggtatctggaaaggttattataatcgtaaaagatgtagaaggaaattctggattatcacatagactttttgtacattaagacttaataaaagtggtgataaaattcgttgccttttctttatgttttattataactggtgtgtctaaagatttgttgaattgtgaatctgcatatatactgtttagagagagactcacaggtgagtaatcgtactgtttgaacagaaactttatagtacattcttagtttcattctgtgttatatttgtttaataatcacagttaaagttaacacaaaatgcaaaaaacactaacataaacttttgatgttgatagtttgttgaaattatcttccgtgtttgttatagttttttttggctctagcttttgtaaaagtaataatcattagcgaactagtaggcctatggcttgattgaccattcttcatcctttcttgttcattgctttcatcctccaatttgtgatgttgagtttttt

SEQ ID NO: 233 - DNA, 669 bp, Diabrotica virgifera
  misc_feature (1)..(669): RNAi target sequence
gtgaagagtgggacaagaatggcccagctaatgaagacagccagccccaaggctatgacggcccaccaggtatggagcctgatggcattattgaatccaactgggaagaggtggtcgataatttcgacgacatgaacctaaaagaggaacttttaagaggaatttatgcctatggttttgaaaaaccttctgctatccaacagagagccatcattccttgtgtaaagggacacgatgttattgctcaggctcagtcaggtactggtaagactgcaacattctccatctctattttacaacaaattgacacgtcagtgagggagtgccaagctcttatattggcaccaactcgtgaattggctcaacagatccaaaaagtagtaattgccctaggagatttcatgtcagcgcagtgtcatgcatgtattggtggtaccaatgtacgagaagacataagaaaacttgaaactggcgtacatgttgttgttggtacacctggtagagtttacgatatgataacgaggagagccctaaggccgactcatattaaaatgtttgttttggatgaggctgatgaaatgttgtcaaggggttttaaagatcaaattcatgacgtgtttaaaatgttgaacactgacgtacaggtaattttactttcggctaccatgc

SEQ ID NO: 234 - DNA, 22 bp, Artificial Sequence
  primer
  misc_feature (1)..(22): forward primer
gtgaagagtgggacaagaatgg

SEQ ID NO: 235 - DNA, 22 bp, Artificial Sequence
  primer
  misc_feature (1)..(22): reverse primer
gcatggtagccgaaagtaaaat

SEQ ID NO: 236 - DNA, 1764 bp, Diabrotica virgifera
  misc_feature (1)..(1764): WCRW transcript 454run12_isotig05267
ttttcaccacttttattaagtcttaatgtacaaaaagtctatgtgataatccagaatttccttctacatcttttacgattataataacctttccagataccaactaaacccttacagagacgaacgaactgtgtggagcaaatcacaacacgcctacgaccgtcggtacccctcgaaacgaggggacctcgggcctccatacagccacacgtctcccgaatgataataaacactaactatatgtatatcaaaaaattaaaaatacactagagattaaaccgaaacaattaaatatatttaaaaattgacactcagagagttcgtggatgattgtgcctcgaacggcgttgtcctaaagaaacgtgatggggcgcagcgcacaatattcgcatatatatgtcgcagcagatttagcatagaaagctaatactcacaccaaagatacttcaggagacgtcgtagaacacaccaacactctttattagctcgcttttatatgagatccgcaacgttcataggcatttcatctatctttgtattatagaactgttcgatatccttaagcgtgcgtttatcatcgtccgttacgaaatttattgctacacccttacgaccaaatcgaccacctcgaccaatcctgtgaatgtaattttctctattagaaggcaaatcataattaataactagggaaacttgctgtacatctatacctctcgctaacagatcagtggttattaaaaccctagatgatcctgttctgaactgacgcataataacgtcacgctctctttgttccatatcaccatgcatagcggaaacagtgaagtctctcttgtgcatgttttctgttaaccaatcgaccttgcgacgggtattgcaaaagattacagcctgcgtaatcgaaagagtatcatagagatcacataatgtctctaatttccaatcttctttttctacatatacataaaattgtttaataccttctaaggtaagttcctcttttttgacaagtatccgaacaggactcctcataaaggattttgtcacgtctagcacatcgtttggcatggtagccgaaagtaaaattacctgtacgtcagtgttcaacattttaaacacgtcatgaatttgatctttaaaaccccttgacaacatttcatcagcctcatccaaaacaaacattttaatatgagtcggccttagggctctcctcgttatcatatcgtaaactctaccaggtgtaccaacaacaacatgtacgccagtttcaagttttcttatgtcttctcgtacattggtaccaccaatacatgcatgacactgcgctgacatgaaatctcctagggcaattactactttttggatctgttgagccaattcacgagttggtgccaatataagagcttggcactccctcactgacgtgtcaatttgttgtaaaatagagatggagaatgttgcagtcttaccagtacctgactgagcctgagcaataacatcgtgtccctttacacaaggaatgatggctctctgttggatagcagaaggtttttcaaaaccataggcataaattcctcttaaaagttcctcttttaggttcatgtcgtcgaaattatcgaccacctcttcccagttggattcaataatgccatcaggctccatacctggtgggccgtcatagccttggggctggctgtcttcattagctgggccattcttgtcccactcttcacgacgatctggcatagacatgtctactccgcg

SEQ ID NO: 237 - DNA, 628 bp, Diabrotica virgifera
  misc_feature (1)..(628): RNAi target sequence
tcattgtgtcctaaaggcatgatcataacgataagtcagcagatgcaaacatccaacttagaacatgccaatttctcttttttctagttttgtaattttttcttcatttatatctgggattaaaaactttattcctttaaatgtaacgttaatatatgaatctcataactagtgttaccccttagatttaaccaagagagaaaataacgctctggtctacatataagtaaacattgcctaatttaaattgatgtttcagaacattcgtcgcagaactcagtttctatgttaaacaacttggaagaactattcatggaagggatactggatctaataaacagactgcaagtaaaagttgtgccctatcagttgtgcgacaactttttcacttgaaagtcattgaagctttttcaggtatgtagaaatgtatatctttctttttaattcctttctctttttatacagagaggggctaaattgtggagtgaattgattttatctagaatggaccactttggagagaaatcgcgaaacgggtcgatttttatttttgaattacaatttttttgcatatgtttcatactggtgacgtcatccatctgggcgtgatgacgtagtcggtgatttt

SEQ ID NO: 238 - DNA, 22 bp, Artificial Sequence
  primer
  misc_feature (1)..(22): forward primer
tcattgtgtcctaaaggcatga

SEQ ID NO: 239 - DNA, 22 bp, Artificial Sequence
  primer
  misc_feature (1)..(22): reverse primer
aaaatcaccgactacgtcatca

SEQ ID NO: 240 - DNA, 697 bp, Diabrotica virgifera
  misc_feature (1)..(697): WCRW transcript ta41281.001_diavv
ttaaaaaaatcaccgactacgtcatcacgcccagatggatgacgtcaccagtatgaaacatatgcaaaaaaattgtaattcaaaaataaaaatcgacccgtttcgcgatttctctccaaagtggtccattctagataaaatcaattcactccacaatttagcccctctctgtataaaaagagaaaggaattaaaaagaaagatatacatttctacatacctgaaaaagcttcaatgactttcaagtgaaaaagttgtcgcacaactgatagggcacaacttttacttgcagtctgtttattagatccagtatcccttccatgaatagttcttccaagttgtttaacatagaaactgagttctgcgacgaatgttctgaaacatcaatttaaattaggcaatgtttacttatatgtagaccagagcgttattttctctcttggttaaatctaaggggtaacactagttatgagattcatatattaacgttacatttaaaggaataaagtttttaatcccagatataaatgaagaaaaaattacaaaactagaaaaaagagaaattggcatgttctaagttggatgtttgcatctgctgacttatcgttatgatcatgcctttaggacacaatgaagaaatgtaactcacagtttacttcttttatttaggtttttggataaggatttttttgaatccc

SEQ ID NO: 241 - DNA, 610 bp, Diabrotica virgifera
  misc_feature (1)..(610): RNAi target sequence
  misc_feature (560)..(560): n can be any nucleotide
ccttcaccaatttccccttactcgggggtaaatacaacagcggacagtacacttacaaaatctaccatttggccagcaaagtaccggcgttcataaggctcctggcaccgaaggggagtttggagatacacgaagaggcttggaatgcttacccatattgtaggaccgtcattacgaatcctggttatacgaaggagaattttgttatttgtattgaaagtatgcatattgctgataatggtcatcaggttaacgttcatgacttacccagtgacaaattgaaacaaagagaagtggtacacatcgacatcgctaatgatagtgtatcgtcgggagattacaaagatgacgaagatcctacgaagtttaagtctcaaaagacgggcaggggaccgctcgtgggtcctgattggaaggacaaagtcaatcctgtgatgacgtgttataaattagtaactgtagaattcaaatggtttggtttacagacgaggatagaaagttttatacaaaaatctgaaaggcggctatttacaaatttccatagacaagttttctgttgnatggaccgctggcacggtctgacgatggaagacatccgtgcaatagaaga

SEQ ID NO: 242 - DNA, 22 bp, Artificial Sequence
  primer
  misc_feature (1)..(22): forward primer
ccttcaccaatttccccttact

SEQ ID NO: 243 - DNA, 23 bp, Artificial Sequence
  primer
  misc_feature (1)..(23): reverse primer
tcttctattgcacggatgtcttc

SEQ ID NO: 244 - DNA, 800 bp, Diabrotica virgifera
  misc_feature (1)..(800): WCRW transcript ta20868..001_diavv
  misc_feature (715)..(715): n can be any nucleotide
aattgcagcaaagaaaacatgctgattaaagaataccgtgtgaccctacccctcacagtcgaagagtaccaagtggctcaactattcagcgtggcagaggcttccaaagacaacactggcggcggagaggggatagaagtattgaaaaatgaacccttcaccaatttccccttactcgggggtaaatacaacagcggacagtacacttacaaaatctaccatttggccagcaaagtaccggcgttcataaggctcctggcaccgaaggggagtttggagatacacgaagaggcttggaatgcttacccatattgtaggaccgtcattacgaatcctggttatacgaaggagaattttgttatttgtattgaaagtatgcatattgctgataatggtcatcaggataacgttcatgacttacccagtgacaaattgaaacaaagagaagtggtacacatcgacatcgctaatgatagtgtatcgtcgggagattacaaagatgacgaagatcctacgaagtttaagtctcaaaagacgggcagaggaccgctcgtgggtcctgattggaaaggacaaagtcaatcctgtgatgacgtgttataaattagtaactgtagaattcaaatggtttggtttacagacgaggatagaaagttttatacaaaaatctgaaaggcggctatttacaaatttccatagacaagttttctgttgnatggaccgctggcacggtctgacgatggaagacatccgtgcaatagaagataaaacaaaagaagaactagaagctctccgtcaaa

SEQ ID NO: 245 - DNA, 524 bp, Diabrotica virgifera
  misc_feature (1)..(524): RNAi target sequence
ggttgccgtcgtttagtagaagtgtcatttttgtctgctctcgttttcatcttttgtgtataaaattggtgctaaggtagataaactatattcgaataggcgtttttatgtcgcaagaaagtgttttgtatatttgtgatacgtgatctcgtagagggagtccagaaattcataatttatagttaagtaaaaatggcggcaaacagaactggacctgctcagagaccaaatggcgctacccaaggaaagatatgtcagttcaaactggtcctactaggcgaaagtgccgtcggtaagtcgagtttggtactgaggttcgtcaaaggacagttccacgaataccaggagagtaccataggagcagctttccttacacaaaccatatgcctcgacgatacaactgttaaatttgaaatttgggacacagcgggtcaagaaaggtaccacagtttagctcctatgtactataggggcgcacaggcagctatagtcgtctacgacataaccaatcaagacacattcgg

SEQ ID NO: 246 - DNA, 22 bp, Artificial Sequence
  primer
  misc_feature (1)..(22): forward primer
ggttgccgtcgtttagtagaag

SEQ ID NO: 247 - DNA, 22 bp, Artificial Sequence
  primer
  misc_feature (1)..(22): reverse primer
ccgaatgtgtcttgattggtta

SEQ ID NO: 248 - DNA, 3182 bp, Diabrotica virgifera
  misc_feature (1)..(3182): WCRW transcript ta01834.005_diavv
ctcaaatattggcagccttgttgacgtcgtttagtagaagtgtcatttttgtctgctctcgttttcatcttttgtgtataaaattggtgctaaggtagataaactatattcgaataggcgtttttatgtcgcaagaaagtgttttgtatatttgtgatacgtgatctcgtagagggagtccagaaattcataatttatagttaagtaaaaaatggcggcaaacagaactggacctgctcagagaccaaatggcgctacccaaggaaagatatgtcagttcaaactggtcctactaggcgaaagtgccgtcggtaagtcgagtttggtactgaggttcgtcaaaggacagttccacgaataccaggagagtaccataggagcagctttccttacacaaaccatatgcctcgacgatacaactgttaaatttgaaatttgggacacagcgggtcaagaaaggtaccacagtttagctcctatgtactataggggcgcacaggcagctatagtcgtctacgacataaccaatcaagacacattcggcagggcgaaaacgtgggtgaaggaacttcaaaggcaggccagtccgacgatcgtgatagctttggccggcaacaagcaagatttggccaacaaacgtatggtagaatacgaagaggcgcagacgtatgctgacgaaaacggcttactttttatggaaacttccgcaaagacggcaatgaacgtcaacgatatatttttagcaatagctaagaaactgcccaagaatgaacaaaccacaggtcaaggcggcagtgcccaaggcaggcggctagcggagggcgattcgggcgccaaggcacccggaaattgttgcaagtgatggtatacgcctgcaggtcgagtgttgttattaaaccgtcacgagaaaggactggcaagtgcagcggcactctagtgatatctatgtgtaataaaggtccttctattaacaaaaaaaaattaataaaaaaatatattaaacttcatatacactgtcacatattccatttagatgatgaaaaacaaaagagcagaagcattttggtctctaacggtcatgttgagttggaatgtctcgtggggcatttaaatttgtgataattgtacctatattttgtttttttatatatataattaatatatctgacagtgtaagttaagcgtaaactgtttatatcgatcgtattagcagcaccaattaaaaaaataaataaaattgaagatcttttttattgtttttgtaattttaactctttggggaaggttacaaaagaattgataacgttgtgttgaaaacattgcattataataaagtaattccacccacttacgaattattttgaaaggagaatcaaaaatgtgtcaattgtcacctgtcatcttatgatgacactctatgagagtgggggcaattgcagcgcgcgcatactattcagtctagcttcattatgtcaattaaatatcgatgtgcattagaaatactgcctaattgaatattttcgacatatgattaaaatttcatcgattagtttgacagttcccaaatgaaaaaacagttacttccgcataaaaatgtattgcttcaaaacttactttcagtggcatttcagtgggttttagccatcttatggagagtggtctaacacactttctaggtacagctgtggtttttaaaaggaaatataatgaatcgcttttgttttcgaaatttacattgggaatcccttagtgtccttatatttgccctacagagtttcatttaaactgaaattgggtaatttacatagacctaaagctttcacgtctatatagcctaattagaccacaaaattgacttgctttacgtgaaatgtatgaaccattcaaacatatttatatgacaacaatataatataatacaatataatataaataactgacaacatttaaaattagaatttttacccacaatttttctctgccatgtgtcatctaatacaagaagtatggcaatttagccctactcctcttattgtacatttcttgtaattcctcattttctttttcaattacttcgatcttttaaacttaattcaccaagtttatttgcaatattgttcttgaagtctatagtttgaattccttcaatatatttgtaatgtttttcttcagtgtcaatccttgcattccatgaaagaacacgaaaaagatgcagcactttatttgtccatattcctgctacatagttatttttcgattaacacattcactgccagcgtatagtaaactggcactttactatacgctaaacaaaaatttggccttgcagattttcctaaaacacgtagcagctacgccactgaatggacttaggaccccctatcgtttcgctggttgcaatagtccggtaactagagacaaaagtgggtcattttgcacacttcatataattctcgttttctgtacttcacgagtattttttttgtcggatatgtattgaatagtatcggtgacaacacactgccctgcgtgacacccctttcaaaacctatgtgggaacaatatgtatctttagagaactttttgtacccttcccctaaaaactaaatattttttcacttagtgcaattttaatattagtctcaccttatttctagaatacggtcgatctaaatgtataatctcaactttcagcttatacttcgaaaaccgagaagtataaactgtaagaatatttaacgttatatgtattttattaggataatgattgttgaaagtatgtttcccaacacgtgtaagttacatttcgtactctttccatttttattacaaaaaaaaatgtttatttagataaactgttgcggaacatactttctcgatgcatgactgaaaagaacgttaacatttatacgtatttgtttttattttgtgtctgatgtgacaacccagatcttagcgaaagcgtagaggacaaaagatgagtttttaagtttcccattgaactttttccgtccttaaatcaaatacaacaactattcacttaagttttctaaacatttttgctaatatgggcccctgcaccattcccgacttaacagtcttcatttgtttttattaggtttgttcgtagtacgatccaaacgatcggcaaccgttgccaaccattagacgcatgcgcgttc

SEQ ID NO: 249 - DNA, 529 bp, Diabrotica virgifera
  misc_feature (1)..(529): RNAi target sequence
atttttgaggttgtcggctagaagttcgcaaagtaaatctaaattccaacaattaaaccgaaatagttctttaaaaaagatgtttcgaaaccaatacgatagtgatgtgacagtgtggagcccccagggccgtctgcatcaggtagaatatgccatggaagcagttaacctaggttcagccacagtgggactgaaaagtaaaactcatgctgtacttatcgctttgaagagggcttcttcagaactgtctgcctaccagaagaaaattatcaacatagacgatcacattggtatcaccatctcgggacttacagctgatgctaggatccttagtagatatatgcgaaacgaatgcttgaattataagtactctttggatacttatatgccattgaataggcttatcagtattttaggtaacaaaatgcagacatgtacccaaagatacgaccgcagaccatttggtgtaggtcttctagtagctggttatgacgaatctggttctcatatctaccaaacgtgcccttct

SEQ ID NO: 250 - DNA, 22 bp, Artificial Sequence
  primer
  misc_feature (1)..(22): forward primer
atttttgaggttgtcggctaga

SEQ ID NO: 251 - DNA, 22 bp, Artificial Sequence
  primer
  misc_feature (1)..(22): reverse primer
agaagggcacgtttggtagata

SEQ ID NO: 252 - DNA, 1051 bp, Diabrotica virgifera
  misc_feature (1)..(1051): WCRW transcript 454run3_isotig10716
cgatgttctgccgtgactgtctcggtctgctttagactaacagagacagccacggcaatattcctttccaataccccctctcctgatcaacgggtggctttaatgctttatctaatccttctattctgtggtatccatggcagaagtttccacagctgggactgcatccctgggctcgtcccccgcatcatctctcaacggatctgcaggaaggtcctcaattgcagcagctgcagctcctcctcctctacgttcttcaccctcaataagggacaagtagggggaagtttcttcttcttcgaggattttaaaggtctgacctttgccagtgtatcctatggagacattttttgttgtgaggtcaacctctggaggtagagtatctctaagagccctcaatccatgtttgataagttcttctaaagaactagatggcaattcatccagatgtttttctaagtatgtcctggcactctgggatcgagctccaatggacatagctttgcaatcgtagaaattagcagaagggcacgtttggtagatatgagaaccagattcgtcataaccagctactagaagacctacaccaaatggtctgcggtcgtatctttgggtacatgtctgcattttgttacctaaaatactgataagcctattcaatggcatataagtatccaaagagtacttataattcaagcattcgtttcgcatatatctactaaggatcctagcatcagctgtaagtcccgagatggtgataccaatgtgatcgtctatgttgataattttcttctggtaggcagacagttctgaagaagccctcttcaaagcgataagtacagcatgagttttacttttcagtcccactgtggctgaacctaggttaactgcttccatggcatattctacctgatgcagacggccctgggggctccacactgtcacatcactatcgtattggtttcgaaacatcttttttaaagaactatttcggtttaattgttggaatttagatttactttgcgaacttctagccgacaacctcaaaaat

SEQ ID NO: 253 - DNA, 533 bp, Diabrotica virgifera
  misc_feature (1)..(533): RNAi target sequence
aggcataacggtcaaagaggtagaggttattataataataatcgggattccaggtatggcgatagagactatcgaggcagaggcagaccgtacgggttccaaaatagaggtaatcgaagacaacagcgcggtagatatggttctagaggagggggaggatacagagattatagggatcgcagatattcaagaagcagatcccgcgaccgcgatcacagcaggtcatacagtcagagcaactcagacgcctctcctccatcgaaacgagacaggtcttctcctccatccgagaaagaaaagatcaacaagtattctgacggagacgcgcccatccagcatgaaggaccgctttctgagggcgaggacagggacgattacatcagcaccgataccagcaagttgatcgatagggaaatcggtggtaaatgggctgataaagaagctgacactagtaaggaggaagccaaagagagtgggcaagggaatactgtggaagtaaaggagtaaagaggtggactttcttttaagtcgtt

SEQ ID NO: 254 - DNA, 22 bp, Artificial Sequence
  primer
  misc_feature (1)..(22): forward primer
aggcataacggtcaaagaggta

SEQ ID NO: 255 - DNA, 24 bp, Artificial Sequence
  primer
  misc_feature (1)..(24): reverse primer
aacgacttaaaagaaagtccacct

SEQ ID NO: 256 - DNA, 3832 bp, Diabrotica virgifera
  misc_feature (1)..(3832): WCRW transcript ta01498.002_diavv
ggggaagataaaataatttcctggtaaatagcttgtcagtgattattaatttatcgtttttattaaaagtatctattttaatctagaatttctcattattaatacaatattttctaaataattgtcacttaaattacaatttttacagaaataaagtattgccgttgaaaaatatctacaaaaccactttggggggtgttcaaaatggacgtcattcttcatattcgctaattgccggtgaaaaatattgtctagagttaaaatggaaacagtaaattcacagttgttgaccaaagccataaactttcatggtcaacagctgcagaagttgtgggaaggagaatttggagaaaatgatttgacaagaaaaaatgtcaaagatttgaattacaatgtgtatagtcaacgccagaagaacctatcttttcaagatagaggtaaacggttgaaactccaacagtttttgataaagaaggctaattttatctatagtttggaacccacgaagcaaaagaacaatgagaaagcgattactgaagatatgtatgctgttatgcctccttttgaaacttacaccagtgtagacaaacaaaaaagagtggcattcttcatggagaatgtgaaagtaggtaatctaatcctgggcaccattgtgagcagacaacaatcaggaatgatgttgaaagtgttgtgtactactggaaatggtaacacttgtttatatgctgctgatatcaacgtcaaggcattctgtccagttgcaaatgtcattaatgcagtggacaaaaagggggtatcacgcaactacatgatgaatgactatgtgtgttgtgaagtgctggaaatcatgcctgatacagataagctaatatgtggtatgatgggtgtgactaggaaatcatcagatccagaacatcgaccacctctagggcttattagtactgaagattttcctcttatatacaaaaaagcgttggatcacaagagtgagagttacgacagtgttttagagaagagcaccgggttcaataaccccaataacattcaatacctctcagaacagatggatgttggtaaacatctcagcttcatcacaggcttaaagtacaggttcccggaaaacgaatatgccaccgagttgagacaagtccaggccagtaaatgggcttaccgcaatgtagcagacggcatagatcattttaaggcgggaaaacacgtggaagcgttccaatgtctcaacaaagccctcaatatagatcccaagaatgtcgaaggtctcgtagcgagaggtgcgctctatgctaacagtggaaatttccagaaggccatcgaagatttcgaaactgctttgaagctgaatcctaatcatggaaacgctcgaaaatatatgggagaaactctcgtcgcattaggaaggagctacgaggaagaaaataaattagaggaagctagaaaagcgtaccagagctgcttgactatcattccttaccacgaagaagctcagaactctttggatttcttaaaatccaaagttcaaccaaaaaatcttattgaacccactgaacttctactgccaagtttgaacgttccctctaagcaaactgacatgaatgacgcgcttaaacaacttctaaagaccgaggaagaagacaaaaaagataagaagaagaaaaagaagagcaagaagcgcaagagtcgaaaacgctccagttctagctcaagttcgagctcgtcggcaagtggagaatcctcctcgagctcgtctagcagctccagcgactcaagctctagctcgggcgattccgattttaaaaagcgcaagaagcacaggtcgaggtctcaccggcgtaaagaacgcgagaattcgctcagtcctttgagcaagaggatggctttgatggatcagagccatgacactcccaataccagttacaatttcaacaaaccagcaagttccagctttgagtttagctttgaacatccagagccttctaaaccacctgagaacgaatacgaaaataaattgagggccttcctggatcaaaccaagggcgactccgactatgaggacaaactgagaaaattcctggaagagacaaaatggaagaaaggcaaaggcgaggacaaaaagaagaagaaaaagaaagagaagaaggccaagaaagagagcaagaaaaagaagaagaaggaaaagatcaagagaaaacagagcttcgatttgagcgaattggacgaccacaagaagctaagggacgccattaagaaggaattgagcaaagaaaagaaatcgaagaggcacagtttggcgtctgaagacgacgagtacatcctgcagaagtcgggttatagtaagaacattaaagaacgaagcgcgagccctcccaagcgcattatagactccccgtctcccacaagggagcagaaggcgcgacaggcagtagccgaagctacggcctctgcgggggcccagaagtggaaaatgcaaattgccggcagttcgggcaattccaggttcaaaaagaagcccgaaagagcgcctcctgcttctgattggcagtctgatagagacaaacgagagcgggagcgagaacgcgatagagagagggaaagagagagagaacgtgctaagagctcttctgcctctgacgattctccaccaccgaaaaaaatgtctttgcctccacttcctccagctgagaaggccgttagtgtgcgcaaggccatggcattgaaagaaccgccactcaaaaagcctgagtctcccaaaaagttaaaactgactccagctccacccttgccgaaaataccgcagggacaagttgtgcttgataaatttggaaacttcaggctgatttctccgcctgaattgaaaaagggagaaggaacgagttcaggtcgccgcccaccggagcccccaggtcgcccgcgcagcgacagccgctcgccgaaacgccgcagtcgcagccgttccagatcgtcgagcggatcgcgatctcgctcgcggtctcgctctcgaagctaccgctcgcgatcgcgcagctactacagcaggtcgcgatcgcgcagcggctcctactactcacgcagtcgcagccgctcgcgcagttactccggagaccggcgcaggtacaaccgcagaggcggcttcagaggcaggcatctcaacgacaggggcacgtactacaaaccgaggttccaaacgccaaggcataacggtcaaagaggtagaggttattataataataatcgggattccaggtatggcgatagagactatcgaggcagaggcagaccgtacgggttccaaaatagaggtaatcgaagacaacagcgcggtagatatggttctagaggagggggaggatacagagattatagggatcgcagatattcaagaagcagatcccgcgaccgcgatcacagcaggtcatacagtcagagcaactcagacgcctctcctccatcgaaacgagacaggtcttctcctccatccgagaaagaaaagatcaacaagtattctgacggagacgcgcccatccagcatgaaggaccgctttctgagggcgaggacagggacgattacatcagcaccgataccagcaagttgatcgatagggaaatcggtggtaaatgggctgataaagaagctgacactagtaaggaggaagccaaagagagtgggcaagggaatactgtggaagtaaaggagtaaagaggtggactttcttttaagtcgttaaagaagatttgttttaagtgtttgctatgtaatataattttttcataatatagaaataaaggttaattgtacacgaaaaaaaaaaaaaaaaaa

SEQ ID NO: 257 - DNA, 583 bp, Diabrotica virgifera
  misc_feature (1)..(583): RNAi target sequence
tgggccagttaagttcgtattccacaacaaaagaatggacccgtggaagaaaagcacttttgggaagcttagggcttattgctggtggtactggtgccttgctgtttgctttggaccaatcagttaaagcatctgatcttgaattgcatcctccaaagaatgtttggagtcattctggaactttcaattccttggatcatgctagtgtaagaagaggttatgaagtatacaaacaagtatgtgctgcctgccactcaatgcgcttcattgcttaccgtaacttaattggagtttcccacactgaagcagaagccaaagctgaagctgaagaacaaatgattgaagatggtcccgatgacacgggtaactttttcaaaagaccaggaaagttatctgactacttccccagtccataccccaatgaagaagcagctcgtgctgccaacaatggttcctaccctccagatttgagctatattgtatctgccagacatggaggcgaagattacatatttgcccttttgacgggttactgcgacgcgccagcgggcgtggtcctcagagacggacaatacttcaaccc

SEQ ID NO: 258 - DNA, 22 bp, Artificial Sequence
  primer
  misc_feature (1)..(22): forward primer
tgggccagttaagttcgtattc

SEQ ID NO: 259 - DNA, 22 bp, Artificial Sequence
  primer
  misc_feature (1)..(22): reverse primer
gggttgaagtattgtccgtctc

SEQ ID NO: 260 - DNA, 1332 bp, Diabrotica virgifera
  misc_feature (1)..(1332): WCRW transcript ta01835.001_diavv
ggggggtacgtgctaggtgcagactggtattacgtaaagtgtcaaaaaattgtatattttttcttagtagcttcctaaaagtgcttaaattctatcaaactagctttctatcacctaaatacttcatgttactctaatctaagggtacgaggggtacaaaataaatttcacataacctatctgcatagtttttgaggggaccctttaggcaacatggctgcaacaataggacgaatttgtggagctggtcttttaaaaccaacaaacttatcctctgtgggccagttaagttcgtattccacaacaaaagaatggacccgtggaagaaaagcacttttgggaagcttagggcttattgctggtggtactggtgccttgctgtttgctttggaccaatcagttaaagcatctgatcttgaattgcatcctccaaagaatgtttggagtcattctggaactttcaattccttggatcatgctagtgtaagaagaggttatgaagtatacaaacaagtgtgtgctgcctgccactcaatgcgcttcattgcttaccgtaacttaattggagtttcccacactgaagcagaagccaaagctgaagctgaagaacaaatgattgaagatggtcccgatgacacgggtaactttttcaaaagaccaggaaagttatctgactacttccccagtccataccccaatgaagaagcagctcgtgctgccaacaatggttcctaccctccagatttgagctatattgtatctgccagacatggaggcgaagattacatatttgcccttttgacgggttactgcgacgcgccagcgggcgtggtcctcagagacggacaatacttcaacccctatttccccggtggtgccatttcgatggcacaagccctatataatgaaaccatagaatacagtgacggaacaccagcaactgccagtcaactcgccaaagacgtcgctgtgttcctaaaatggacgtcagagccagagcatgatgacagaaagaaaatgttaatcaaagtgatcggcatcttttctcttcttattggtatcacttactatgctaagaaactcaaattctcttcactgaaatcgagaaagattgaatttaggcccaagagtaaataaataagtattgtagatgaattttaaacaaggtttagcgtgactaccatagttattattatcttaaggtctaattttattgtacatatttacagactttccaactgactggggtttgcatttgccaccttggtttatttattttttccaggctttattattattgtgtcacgttatgtttcaataaaaaaaaataat

SEQ ID NO: 261 - DNA, 546 bp, Diabrotica virgifera
  misc_feature (1)..(546): RNAi target sequence
gatcccctgcacttggattatgttattgctgcagctaatttgaaggctgaagtttatggtataccaactagtagaaatagagaacaaatcgcagaagtggttatgcaagtcaatgttccagaattcatccctaaatctggcgtaaagatagcagttacggattctcaaatggctatgaatggtaataatgtggatttggatcgtgtttcccaaattaaagaagaattaccctcagtagcagaactaggtggactacgtcttactcctttagaatttgaaaaggacgatgacaccaatttccacatggactttatagttgctgcttcaaatcttcgtgcagctaattacaaaataccgcctgctgatagacataaatcaaaacttattgctggtaagattattcccgccatagcaacaacaacctcagtagttgctggaatggtttgcttggaactctacaaactcaccagaagctatacatccctaactccattcaaaaataatttcattaacctcgctctgcctttcttcagttgctcagaacca

SEQ ID NO: 262 - DNA, 21 bp, Artificial Sequence
  primer
  misc_feature (1)..(21): forward primer
gatcccctgcacttggattat

SEQ ID NO: 263 - DNA, 22 bp, Artificial Sequence
  primer
  misc_feature (1)..(22): reverse primer
tggttctgagcaactgaagaaa

SEQ ID NO: 264 - DNA, 4199 bp, Diabrotica virgifera
  misc_feature (1)..(4199): WCRW transcript ta05794.001_diavv
tgagaacttgcgtggttcatttctttcctttgtcccatcattctgattcattttcagcttaatttttccatgtagtgccggttaattgaagtgatatatgatttatttatgtgattacatctaacagcagactcataaaattgtgtctttttgtgtccgatgtctagtggtagtttagcagacaactccatcgatcctccagccaaaaagcggaagcttgaatcaaagattgctaccctcgaaatggcgaacaatgaagcttcaggatcctccaccagtgatattgatgagggactttactcgagacaactgtacgttttggggcacgaagctatgcgccgcatggcaaatagtgatgttctaatatcaggtttaggtggtttgggtgtagaagtagctaaaaatgtaattcttggtggtgttaaatctgttacccttcacgatgaggctctttgtactattaaggacctgtcatcccaattttatttaacagagggggacattggtaaaaaccgcgcagaagcctgctgtaagcagttatctgaactcaacacttatgtccccacaaagtcttacacagggccccttgatgaagctttcatcttaaagttcagtgctgttgtcttaaccacaagcaatcgtgaagagcaactaagaatcagtgagataacacacgaaaacaacattgcattaattatagcagacacgaaaggcctttttgcacaagtattttgtgatttcggaaaatcctttactgttgtagatgtaaacggagaacctttagtctctgcgatgatagcagacatttcgaatgatgtcgaaagtgtagtcacttgcattgacgatacaaggcatggtatggaggatggagactatgttaccttctcggaagttcagggaatgactgaattaaataactgtgaaccaatcaaaatcaaagtattaggaccatacacctttagtattggcgataccaccaagttttctaaatacaccagaggtggtattgtaagtcaagttaaaatgccgaaacatctggaattcaaatcgtttaaagattctcttgaaaatcctgagataccaattactgattattcaaaaatggattttcctacgcagcttcatctagcttttaccaccttacataagtttgtagaaaagtctgcaaggctacctaaaccatggaacaatgaagatgcaacagaatttgttaatttagctaaatcgttagctgcaaagggtgattctgaaggagaagttaatgtagaccttttagacacatttgccaaggtatcggctggagatttaaatcctataaatgctactattggtggtattgtagcccaagaagtaatgaaggcatgttctggaaaattccatcccattttccaatggttctactatgatgccatagaatgcctaccacaagataaatcagaaatcactgaagaactagctgcacccactggtagcagatatgatggccaagttgctgtttttggaaaagaattccaaaagaagttagcatcactgaaatattttattgttggtgctggagctattggttgtgaattgttgaagaactttgctatgatgggtgtaggaacacaaggagaagttacagtaactgatatggatttaattgaaaaatctaatttgaacaggcagttccttttcagaccacataacgtccaacaaccaaaatctgccacagctgcaaaggtcattaaaaagatgaatcctgatatcaatgttgttgcacatgaaaatcgtgttggacctgaaactgaaagtgtctacaatgacgatttctttgaaaagcttgatggagttgctaatgcactggataacgtagatgctagaatttatatggatagaagatgtgtctactaccgcaagcctcttctagagtctggaaccctaggaactaagggaaatactcaagtggtggcacctttcctctctgaatcatacagttcttctcaagatcctccagagaaaagcattccaatctgtactttaaagaatttccctaatgctatcgaacatactctacaatgggcaagagatatgtttgaaggattgtttaaacaaaatgccgaaaatgcttcgttgtacataacagaccctgatttcctcgataggactgttaagctacctggtgtacaacctttagaggtattggaatccgtaaaggctgccttaattgatgagagacctaaagatttaaatgattgcatcgcttgggcacgtaaccattggcaagaacagtattccaaccaaattaggcagttgttgttcaactttcctcctgatcaattaaccagtacggggcagttgttctggtcgggaccgaagagatgcccagaagcgcttacttttgacgtaaacgatcccctgcacttggattatgttattgctgcagctaatttgaaggctgaagtttatggtataccaactagtagaaatagagaacaaatcgcagaagtggttatgcaagtcaatgttccagaattcatccctaaatctggcgtaaagatagcagttacggattctcaaatggctatgaatggtaataatgtggatttggatcgtgtttcccaaattaaagaagaattaccctcagtagcagaactaggtggactacgtcttactcctttagaatttgaaaaggacgatgacaccaatttccacatggactttatagttgctgcttcaaatcttcgtgcagctaattacaaaataccgcctgctgatagacataaatcaaaacttattgctggtaagattattcccgccatagcaacaacaacctcagtagttgctggaatggtttgcttggaactctacaaactcaccagaagctatacatccctaactccattcaaaaataatttcattaacctcgctctgcctttcttcagttgctcagaaccaatcgcagcccaacaaatggaatactgtggtaacaaatggacactctgggaccgcttcgacgttcagggagagatgacacttagtgaatttttggaatacttcaaggaaaaacacggtcttgaaattacgatgttgtcccagggcgtctgcatgctgtattcgttcttcatggcaaaagctaaagctcaagaacgtttcggtctttcgatgtcagaagtcgtcagacgggtgtcaaagaagaaaatcgaacctcacgtaaaagcattggtattcgaactgtgttgcaacgattccactggtgaagacgtggaagttccatatgttaaatacaatttatgttgagccgactcagttcaaaactcaacttaaaagacttaagagttttgttaggtcagtttctggattaagagtacgggaaaactagccacgttttactatttacacattgtgagattgctgaccaatagttggaatacatattagcagcaagagcttgtgtcttttattatttattatttatcagctgttttttaatatttgcagacctttaaatattttttataacttttaaatgtcctttttgtattaacgtcatggcaaccactgttagtatttaacccttccagctccgctgtaatatgtccagcatcatgacgcacttacgcgtcaaatacactggccaagtcatctttggacgcgcgtatgcgtcaccgtagctgaaagagttaaatctctgtaatttctccaattttcgtttacccaaaaactgatctatactgaatttgggtacttgactggaaagtgtgatctaaattattcttctcaaagaaattgtttgctgtcattttgagataggttaatgaaattaataacggaaaggattagcatttaaacacgttgatgcaatatacttataataacttgtaggagtatgtttatttttatgaaaatagtagttttcaggtaacagttattattttcttaagaaattttcatgtgtgagaataaaataaatatttacaaaaagttccttgttttccttatatacctacaatcgtcgacgactgtagctcaacaacaatatactaagtcgattctatgctccaacaacattttcatttttaaaaatgataaaacaccaaaagtacacatttgttctcatcttactaaggcacgtcgaataatatatcgcttatactatttcagtgacttaaaacgtaagaacagtaaacgtaacagtaagaaattttcatgtgtgagaa

SEQ ID NO: 265 - DNA, 644 bp, Diabrotica virgifera
  misc_feature (1)..(644): RNAi target sequence
gaatttgatttggcattttggtatgtagaaataaaattatcttgtcaataaataatcagaaatattgaaagtagaatcgttctaaataattagaaattgaaagtagaacagtttgttcgttttactaggtagtaaagagttaaatagacaacaggacgctgttaaaaggtaagctattgccgccatacttttcctgactgaatttattaattttttgtttacctaaaaacattattgtttttaaacacattttgtttttgataacatatttaatctaatactagaaaagccaaaaattacaaaataaggtaaagaatctaaatggtttattactattagggcccccaggcattaggcagtctatgtacatgtaacagccagagccaattcgtgggcaagttgtatccttcaagggatgtagaagtgcaagaggtcataattatttactatttctctcgtagaaaactcaacatataagcatcgaattcaaattcagcctcttcttttataacatcacttgaaaggcatttcaattatattttggaagcatgtttgtaggttcccagatatacaaaaatgtcagttcaatcgtttgataatcttctgtataaattaattcaatcaaggccactgatactcctatg

SEQ ID NO: 266 - DNA, 22 bp, Artificial Sequence
  primer
  misc_feature (1)..(22): forward primer
gaatttgatttggcattttggt

SEQ ID NO: 267 - DNA, 22 bp, Artificial Sequence
  primer
  misc_feature (1)..(22): reverse primer
cataggagtatcagtggccttg

SEQ ID NO: 268 - DNA, 712 bp, Diabrotica virgifera
  misc_feature (1)..(712): WCRW transcript ta41459.001_diavv
tcagccagatctatccccaatgtttttaaaatgatttttgatactgaaaaattaaaattaattcacataggagtatcagtggccttgattgaattaatttatacagaagattatcaaacgattgaactgacatttttgtatatctgggaacctacaaacatgcttccaaaatataattgaaatgcctttcaagtgatgttataaaagaagaggctgaatttgaattcgatgcttatatgttgagttttctacgagagaaatagtaaataattatgacctcttgcacttctacatcccttgaaggatacaacttgcccacgaattggctctggctgttacatgtacatagactgcctaatgcctgggggccctaatagtaataaaccatttagattctttaccttattttgtaatttttggcttttctagtattagattaaatatgttatcaaaaacaaaatgtgtttaaaaacaataatgtttttaggtaaacaaaaaattaataaattcagtcaggaaaagtatggcggcaatagcttaccttttaacagcgtcctgttgtctatttaactctttactacctagtaaaacgaacaaactgttctactttcaatttctaattatttagaacgattctactttcaatatttctgattatttattgacaagataattttatttctacataccaaaatgccaaatcaaattcccc

SEQ ID NO: 269 - DNA, 629 bp, Diabrotica virgifera
  misc_feature (1)..(629): RNAi target sequence
  misc_feature (568)..(568): n can be any nucleotide
  misc_feature (594)..(594): n can be any nucleotide
tgagaaaaactgtcctttgcatttgcagcgttaaagatcggtctcagtaataaaattatttgtagagtttgcaatttcctgaaaatagtgacctctgataaagttcacaacagttcaataattggtagtggcgcatatcagtgtctttgacgaagccatgattaatatagctggtggtgcagtgatttcttcgtttgcggtgtatttgttattaagatacaggactagaatgacgtcccttttgacatggattattggaaatattagatctcaacaagctgtcagcagtacatcacaagaagaagagaaatctgacaaatccagcagcaataaacccaagcaacagtttaaaggtggcaaagttcgacagaggcctaaaaaacttaacgaagatcccacatttagtacaagtttatcaacccccattgaagatataatagaggaaacaatcaatgaagaagcagtagcagttaataagaaaaaaggaaaatcatccaaaaagcaaactgaagaattgccagtgaaaaaggaaaaacccacaaaagatctagatgatgacataggttantcatttttcaaagttaaaactgtttnccaaaggaaatccagaagccaagcctaagaaacaa

SEQ ID NO: 270 - DNA, 22 bp, Artificial Sequence
  primer
  misc_feature (1)..(22): forward primer
tgagaaaaactgtcctttgcat

SEQ ID NO: 271 - DNA, 22 bp, Artificial Sequence
  primer
  misc_feature (1)..(22): reverse primer
ttgtttcttaggcttggcttct

SEQ ID NO: 272 - DNA, 1750 bp, Diabrotica virgifera
  misc_feature (1)..(1750): WCRW transcript ta03339.001_diavv
  misc_feature (633)..(633): n can be any nucleotide
aaaagtagcgaaggtacaacgtgtagagaatagtcagtctgagaaaaactgtcctttgcatttgcagcgttaaagatcggtctcagtaataaaattatttgtagagtttgcaatttcctgaaaatagtgacctctgataaagttcacaacagttcaataattggtagtggcgcatatcagtgtctttgacgaagccatgattaatatagctggtggtgcagtgatttcttcgtttgcggtgtatttgttattaagatacaggactagaatgacgtcccttttgacatggattattggaaatattagatctcaacaagctgtcagcagtacatcacaagaagaagagaaatctgacaaatccagcagcaataaacccaagcaacagtttaaaggtggcaaagttcgacagaggcctaaaaaacttaacgaagatcccacatttagtacaagtttatcaacccccattgaagatataatagaggaaacaatcaatgaagaagcagtagcagttaataagaaaaaaggaaaatcatccaaaaagcaaactgaagaattgccagtgaaaaaggaaaaacccacaaaagatctagatgatgacataggttattcatttttcaaagttaaaactgtttnccaaaggaaatccagaagccaagcctaagaaacaagtttctgttgacctaaatgaagataacacagcagatgatataggtttctcatttttacctgtcaaagaaaaaggcaaaaaatataaatctaagagtaatccagaaaataaagaccaagaactgactttaaacgcagtggtagatcagacactgaggaaagctaaatatgatacatcaaagccgtcaagaatagaacattacaaaaagagaacaactgacaaagctttttccaaaaaaggctgcaacaaaatttgaaagtccttcagtatctacaatcgtagaaaagagattgttgtatgaaagcaaacttaaaagtgaaactaaggagagcaaaaaagttacatcttctatttcctttgctagcatagtcagtaatgctactgacgccccttcaggttctgatattgaacaaaattcccagttactaaatggacctaagcctgatattcaacagcatatctttgagtctttagagtcagtaaaatctagtgctgagtccgtagaagtaattgatgatagcaattctgaatatcaaaacagtcaatccaccaattttgagacaatcaaagaaaaattaaatactttactcgatgaggattctgattttaatcaaactcaaatagagcaatcaaatgtatatgaaatagatcaatcttcaaagcattcttctgtatatattgtaggaagtaacgaggtattggaagaatcatcctccacacaagattcttatattggtcatacaggttttgaacaagaacctgaacaaacattcagtcagaaaactctagaagcttctatagacaacagatttataacagatgccagtatattagaaaaaagtacatccactgaagcttttcttagttttgaaagacatatcgaatcacaagatctaacacacagtcttgaatccagtaattattatcaaaataattattcacagttaaattttgacaatcaacttcaaaactcttcagaaagccatatttctgattacagctattcccaaaatcaacagtccctaagctcaagcgacttttctagagactacaattctacagaccattcctttacagaactag

SEQ ID NO: 273 - DNA, 700 bp, Diabrotica virgifera
  misc_feature (1)..(700): RNAi target sequence
  misc_feature (608)..(608): n can be any nucleotide
gagagcacttttcgcagttaccacagcggaccggcttttcaacaaacagaaacaatcagaggaccggtgtaaaagtgatggatccttcatttgagaatgctgggcaagtggatggccttgaaatatggagaattgaagacttcaaacctgtgccttatcctaaaaatcaatacggcaaattctacacaggagactcatacattatactaaataccaaaactacaagaagtggtgccaaagtacatgatcttcatttttggttaggtgctgaaactagccaggatgaacaaggatcagctgccatatatacagttcagttggacgagcatttgaacggagaaccagtccaacatcgtgaaacccaaaaccacgaatctcaactgttcttatcttacttcaaaagcggtggtattcgataccttcctggtggtgttagctctggcttccaccatgtcgatcctaatgctttcgagaagaggctgttccaagttaaaggctctagaaatattagagttaagcaagttaccccatcaatcgcctctatgaacactggtgactgctttattttggacgttggaagagatatttatgtctatgttggtactaanggctagaagagttgaacaactcaagggctattaatgctgccaaccaaattcgcgaccaagatcatgccggaaaggccagagtaaccattgtc

SEQ ID NO: 274 - DNA, 22 bp, Artificial Sequence
  primer
  misc_feature (1)..(22): forward primer
gagagcacttttcgcagttacc

SEQ ID NO: 275 - DNA, 22 bp, Artificial Sequence
  primer
  misc_feature (1)..(22): reverse primer
gacaatggttactctggccttt

SEQ ID NO: 276 - DNA, 2169 bp, Diabrotica virgifera
  misc_feature (1)..(2169): WCRW transcript ta00090.001_diavv
gggggactagctgtatgagctttcgtaacgttcggttgtgtgacagttcagtgtggaagtgataattcaaaaaaaaacgcaggcgacaaaaacaaaataggaactacataatagagagagaccgaggcgaataagatggaccacccttaaaccacccaaattagaacattaaaaggtgtttttcaaagctctcaaattcaatagctagcgcatgtccaaaatgtggggaaacggagcgtttagtcgcggcactttggtgtgtctcgcgcttttagtttatctgaaagatagtagctgtgtgactacaaacagacgagagcacttttcgcagttaccacagcggaccggcttttcaacaaacagaaacaatcagaggaccggtgtaaaagtgatggatccttcatttgagaatgctgggcaagtggatggccttgaaatatggagaattgaagacttcaaacctgtgccttatcctaaaaatcaatacggcaaattctacacaggagactcatacattatactaaataccaaaactacaagaagtggtgccaaagtacatgatcttcatttttggttaggtgctgaaactagccaggatgaacaaggatcagctgccatatatacagttcagttggacgagcatttgaacggagaaccagtccaacatcgtgaaacccaaaaccacgaatctcaactgttcttatcttacttcaaaagcggtggtattcgataccttcctggtggtgttagctctggcttccaccatgtcgatcctaatgctttcgagaagaggctgttccaagttaaaggctctagaaatattagagttaagcaagttaccccatcaatcgcctctatgaacactggtgactgctttattttggacgttggaagagatatttatgtctatgttggtactaaggctagaagagttgaacaactcaaggctattaatgctgccaaccaaattcgcgaccaagatcatgccggaaaggccaaagtaaccattgtcgatacctacagtccagaaagtgactatactacattctttgaagccttgggtgaaggttccagagactcagttcctgactataccaccagtgacgacgatgaatctttcgaacgcacagaggaaaatcatgcttcactttacaaggtatcagatgctactggctctgttaaagtaaccaaagttggacaaaaacctttggaagctagttcattggaccccagcgactgctttattttggataccactgatgccttattgtatgtatggatcggcagcaaatgtgatgaaagagaaaagaaggaagcgatgaataaagctgatgggttccttaatgcgcacaatcaccctaaatggacacatgttcaaagaattgttcaaggagctgagcctactgcgtttacacaatatttcagaaattggcaggcctttggagaaacccacccaagattactacgttctgtcagcacctcagcccacctttaccattgccaaatccgttcaagatctcgcagacttaaagtcgaagagattagggactatgagcaggaagacctctgggaggatgacatcatggtcttggacgctggtgatgttgtgtttgtttggaacggcaaaggagcttcagatgaagaaaaatctagaggacctaaatacgtacataaaatgttgaatcgtcaaggtcgtgaagacgtaccagtaaaaataatcgagcaaggtgatgaaccagaagaattcacaatacacttcccagcttggtcagcagatcactgggacaatttaccagatgtaagaagctacatcaaaaatgaggaagactgaattctgttatcatgattgaccaacgcgtcacttgttttaaataaggcttttaagttgaaaaatgtgcgcaaaaatattatagctttaacatttttaaatatgcatttatatagctgttttagttttttatatgccaatgctctcggttaaatagaaatagtttcaaaattattgttacaacactagaaagaacttatgaattgtgcctaaaaaagatttttaaatactatatttaaatgatactttatatatgtactgttgtgtacctatcagtgttattttttaaaatgtatttgttaagcttgtgtggttacaaaaactataataaaaatattaat

SEQ ID NO: 277 - DNA, 608 bp, Diabrotica virgifera
  misc_feature (1)..(608): RNAi target sequence
  misc_feature (561)..(561): n can be any nucleotide
  misc_feature (562)..(562): n can be any nucleotide
caacctggaactttaactgctgcagctgcaacaccaggtaaaggtaagaagaaggaagaaaagaaacaagagaagaagccacaaacacctaaagaaaagaaggaaaaggaacagccagaagaattagatgctgcagaagccgctcttgctgaagaacccaagagtaaggaccctttttctgaactacctaaaggaacctttgttatggatgactttaaacgtgtctattcaaatgaagaagagagcaaatcaattgcttatttctgggaaaaattcgaccctgaaaactattcaatctggtatggtgaatacaaataccctgaagagctctccaaagtgttcatgagctgtaacctaattactggcatgcaacagagactagataagatgagaaagcaggcctttgcatctgtatgcctttttggagaagacaacaacagcacaatctccggtatctgggtatggagaggacaagaattagcttttaccttaagtcccgactggcaaatagattatgaatcctatgaatggaagaagttagatgccaaatcagaagaaacnngaaattagtagagcaatacttctcatggacaggtactgacaagcaa

SEQ ID NO: 278 - DNA, 22 bp, Artificial Sequence
  primer
  misc_feature (1)..(22): forward primer
caacctggaactttaactgctg

SEQ ID NO: 279 - DNA, 22 bp, Artificial Sequence
  primer
  misc_feature (1)..(22): reverse primer
ttgcttgtcagtacctgtccat

SEQ ID NO: 280 - DNA, 1508 bp, Diabrotica virgifera
  misc_feature (1)..(1508): WCRW transcript ta20625.001_diavv
ggggctctttagctagttttgagtgtagtgagaatggctgccggaactctttacacttatcccgaaaatttccgggccgcaaaaactctgattgccgcacaatatgccaaggcaaacgtcaaagtagcacccaattttgtttttggagaaactaataaaactaaagagttcaccaagaaatttccaagtggaaaggttcctgcttttgaatcaaacgatggcaagtaccttcaagacagcaacgccatcgcttactatgtttccaatgaacaactaagaggaaaaaacgaatatgatagagcacaaattttgcaatggattggctttgctgaaggtgaaattgttccagcagcatgtgcctgggtattccctatcttgggaattgttaaaaataacagtggtaatgatgagactttccaaagagcaaaggaagaccttaaatcctctttgtctattctcaacagccacttacttgcccacacttacttggtaggagagagaatcactctagctgacattgtagttgcctgcaacctattgaatgcctacaaatatgtacttgatcccaactttagaaaatcttttggtaacgtcaatagatggttcaatacacttattaaccagccacaattcatagctgtacttggagaagttaaactttgcagtgcagttgctcaacctggaactttaactgctgcagctgcaacaccaggtaaaggtaagaagaaggaagaaaagaaacaagagaagaagccacaaacacctaaagaaaagaaggaaaaggaacagccagaagaattagatgctgcagaagccgctcttgctgaagaacccaagagtaaggaccctttttctgaactacctaaaggaacctttgttatggatgactttaaacgtgtctattcaaatgaagaagagagcaaatcaattgcttatttctgggaaaaattcgaccctgaaaactattcaatctggtatggtgaatacaaataccctgaagagctctccaaagtgttcatgagctgtaacctaattactggcatgcaacagagactagataagatgagaaagcaggcctttgcatctgtatgcctttttggagaagacaacaacagcacaatctccggtatctgggtatggagaggacaagaattagcttttaccttaagtcccgactggcaaatagattatgaatcctatgaatggaagaagttagatgccaaatcagaagaaacaaagaaattagtagagcaatacttctcatggacaggtactgacaaacaaggtagaaaattcaatcaaggaaaaatctttaaatgatctacatctatttaataaatcttacaaaatgctgtactgatcatgtgaagcaagagaaataaatcccaatgttttgttaataatatttttttattaatatgtaattgttttgatcgaagcttattctttgggctttactccctgagtttataagacacttaaataaatttaataacaatttaaaaaaa

SEQ ID NO: 281 - DNA, 724 bp, Diabrotica virgifera
  misc_feature (1)..(724): RNAi target sequence
gtcagtgtcatcatttgacgtgtcaagtttggggttaaattttgttaatttcaagaattaaaatatttaacataaaaatggtttctatattaaattcaatagatactggtcatgaagatatgatacatgatgcagaagtagattattacggtttaaggttagccacttgttcctcagataacagcatcaaagtttatgatataaaaagtggagcttccacactactggatgatctaaaaggccactatggacctgtttggcaaatagcttggagtcatcctaagtttggcaacttattagcttcgtgttcttatgataggaaagtaataatttggaaagaacagcaaagaaaatggataaaatattatgagtatgcaaatcatgattccagtgttaactctgttcagtttgcacctgctgagctaggtttaattctggcttgtggaagtagcgatggttcaatttctcttttaacttataatgttggaagtaatatttgggatgccaagaagattcaaaatgcccatgcaataggatgtaatgctgtaagttgggctccagccataacccctgtttttggagatgagactacacctgtgaaacgtcttgtttctggaggatgtgacaatttagtaaaaatatggagggaagatggtgacaggtggattgaagagtccaaacttgaagtacgctctgattgggtaagagatgtagcttgggctcc

SEQ ID NO: 282 - DNA, 22 bp, Artificial Sequence
  primer
  misc_feature (1)..(22): forward primer
gtcagtgtcatcatttgacgtg

SEQ ID NO: 283 - DNA, 21 bp, Artificial Sequence
  primer
  misc_feature (1)..(21): reverse primer
gagcccaagctacatctctta

SEQ ID NO: 284 - DNA, 1151 bp, Diabrotica virgifera
  misc_feature (1)..(1151): WCRW transcript ta06970.001_diavv
gggggacagttgtcggcggcccgcagccaaaatccatgttacgccgagacgttcgtatttgacgtgtcaagtttggggttaaattttgttaatttcaagaattaaaatatttaacataaaaatggtttctatattaaattcaatagatactggtcatgaagatatgatacatgatgcagaagtagattattacggtttaaggttagccacttgttcctcagataacagcatcaaagtttatgatataaaaagtggagcttccacactactggatgatctaaaaggccactatggacctgtttggcaaatagcttggagtcatcctaagtttggcaacttattagcttcgtgttcttatgataggaaagtaataatttggaaagaacagcaaagaaaatggataaaatattatgagtatgcaaatcatgattccagtgttaactctgttcagtttgcacctgctgagctaggtttaattctggcttgtggaagtagcgatggttcaatttctcttttaacttataatgttggaagtaatatttgggatgccaagaagattcaaaatgcccatgcaataggatgtaatgctgtaagttgggctccagccataacccctgtttttggagatgagactacacctgtgaaacgtcttgtttctggaggatgtgacaatttagtaaaaatatggagggaagatggtgacaggtggattgaagagtccaaacttgaagtacactctgattgggtaagagatgtagcttgggctccatcagtaggactccacagatataccattgccagctgttctcaagacaggagagttgttatatggactagcaatgattgcatcaattggaattcaacagtcttacatacatttgatgatgtagtttggaatcttagttggtctttgaatggaaatattttagctgtatctggtggagataataaaattaccttgtgggatcaaaactcagaaggtagttggcaatgcattagtgatattgccaagggccaaggtcaaatcaataatcaatgaattcgctatttaaatagatttcgaaagtgttatattttgcattttcttctgtattaagttttaatgaatgtatattttactactctaattttaaaattaaattaataaaaat

SEQ ID NO: 285 - DNA, 501 bp, Diabrotica virgifera
  misc_feature (1)..(501): RNAi target sequence
tgtccaataatgtgtgttgtgaagtgtaacaaatatgaaaaagactacacttagaatatgagttaaaattggttgaagattcctttgtatttagtttgtagttacacaacagtacagacatggcaagggagcaggtaaccagaaaatgggaaatatttcaaggtagaaataggttttactgcaatggaaggctgatgacagcaccgcattctggggtatttttgttgacacttttttttaattactgtaacgagtgtgttattttttgtatttgactgtaaatatttagcagaaaatgtgacaatagccattccgatcatcggagctttgctgttcttatttacagtgtcttcccttttgcgtacaagcttgtctgacccaggtattatacctagggcgtcgtcagaagaggcagcctacgttgaaaagcaaatagaagtaacaaactctgccaacagtcctacatatagaccgccacccaggacgaaagaagttttggtt

SEQ ID NO: 286 - DNA, 23 bp, Artificial Sequence
  primer
  misc_feature (1)..(23): forward primer
tgtccaataatgtgtgttgtgaa

SEQ ID NO: 287 - DNA, 22 bp, Artificial Sequence
  primer
  misc_feature (1)..(22): reverse primer
aaccaaaacttctttcgtcctg

SEQ ID NO: 288 - DNA, 2197 bp, Diabrotica virgifera
  misc_feature (1)..(2197): WCRW transcript ta06058.001_diavv
gggggtcaaagtcaactgtcaaaattgttgagtcgtgaatgtcggataatcttcactttttaggagtgtttcttgtttatttgtaaaaaacgataatatgcgtatctctaaacaagatgatatattaaattctgtccaataatgtgtgttgtgaagtgtaacaaatatgaaaaagactacacttagaatatgagttaaaattggttgaagattcctttgtatttagtttgtagttacacaacagtacagacatggcaagggagcaggtaaccagaaaatgggaaatatttcaaggtagaaataggttttactgcaatggaaggctaatgacagcaccgcattctggggtatttttgttgacactttttttaattactgtaacgagtgtgttattttttgtatttgactgtaaatatttagcagaaaatgtgacaatagccattccgatcatcggagctttgctgttcttatttacagtgtcttcccttttgcgtacaagcttgtctgacccaggtattatacctagggcgtcgtcagaagaggcagcctacgttgaaaagcaaatagaagtaacaaactctgccaacagtcctacatatagaccgccacccaggacgaaagaagttttggttaaaggtcaaaccattaaacttaagtattgcttcacttgtaaaatatttaggccgcctagagcttcgcattgtagtttatgtgataattgtgtagataggtttgatcatcactgtccatgggtggggaactgtgttggtagaagaaattataggtttttttacatgtttatagtatcactggcgtttttagcagtatttatatttgcctgtgcagttgcgcatcttattttaatgacgaaggaagatcgagaattcctagatgccgtgaaggaatcccctcccagcgtgctagttgcagtcatttgtttttttagtgtttggagtattttgggcttggccggattccatacgtaccttacggctagcaaccaaaccactaatgaagatataaaaggatcttttacaagcaaaagaggccaagaaaacgtcaacccttattcggagggcaacgtctgcttaaattgttttcacattctctgtggaccggttactccttcgttaatcgacagaagaggtgttgtcacagaaagctaccaatacgaaaacagtagacctgttaccaatgcaccaactttgcctttgaagaaatatggattgcccttgcagaatggtccccaacaagtgacacctgacgcagcggaaatgccaggcatctaccgccaaaccaccgagaacacggaaagcaacacgggtagcgtaacccacttagtgtctagcgaacagcccctagccgtcgttcccgccgcagtgcatctacagagaacccacggggacttgcaacagtaccagtcgcagaccagtctgaaccactccccggtctacaacaacatcaccccaacgcacgccgctcccgcgcaactcagcaaatcacaaagctgtatcgacaatataaattccacgtcttcatcgaaagaaaacggcgcgaaagacattacattgaacatggaagacctccatttggatcctgtgatattgagggagaaccacgtactggtcaacatcaacgacaaaggacggctcgccgatttgaggctagacaacgatatgacagtgcaagacaaggagaacagtttgttgagtgttagtaggttgcgactgttgcaagacacgacgatgatcgagagtgctttagacttggattcgttagatgggtctagtttaggtacgaatagtcaggcgggattgatgaaagtagacgtgtagttcattcgagaacttttagaagagaatgtttgtcatttgtttggcaacagccaacatatagtagtattgaatacagaagaacgtaaaataactcatgatagtgcaataaaatgggatttctttgttttcgacttattttattggtcaaaagttttgtttatatttttataacagaataaatatgattaaataattgatttgcactttaaaatgtataaaaatcatcagcagatttatctgtagcaatgcaagacacttttatagtaatctccagctagggaaaacttacgcagtgcatcttagtatttcagaattaaattttaaatgaaaaagacctttataaaagatatatttattttaaa

SEQ ID NO: 289 - DNA, 628 bp, Diabrotica virgifera
  misc_feature (1)..(628): RNAi target sequence
aatttgtgcctcggaattgtattttttacgttttttagtggaatttgggcttcagccgaaaaaataccactgggagcaattttcgaacagggcacagatgacgtccaaacagcatttaaatttgcgatgttgcagcacaatcaaaatatttccagtagaaaatttgaatttcaagcatatgttgacgttattaatactgcggatgcatttaaattgtctagattaatttgcactcaattttcaagaggtgtatattcgatgttgggagcagtttctccagattcatttgatacgctacattcctatagtaatacttttcaaatgccttttgtaacgccttggtttccagaaaaagtattagccccgtcatcgggatttatggactatgctatttcaatgcgacctgaataccacaaagccatcatagatacggttaagtattacggatggaggcagattatatatttatatgattctaatgatggtctcctaaggttacaacagatataccaaggattaactcctggcagtgagatttttcaagtcactactgtacggagaataaacaatgttagcgaagcattatcatttcttagaggaatagaagaacatactcgatggaccaaca

SEQ ID NO: 290 - DNA, 22 bp, Artificial Sequence
  primer
  misc_feature (1)..(22): forward primer
aatttgtgcctcggaattgtat

SEQ ID NO: 291 - DNA, 22 bp, Artificial Sequence
  primer
  misc_feature (1)..(22): reverse primer
tgttggtccatcgagtatgttc

SEQ ID NO: 292 - DNA, 690 bp, Diabrotica virgifera
  misc_feature (1)..(690): WCRW transcript ta41486.001_diavv
gatcacgtcatgggcaccacaaatttgtgcctcggaattgtattttttacgttttttagtggaatttgggcttcagccgaaaaaataccactgggagcaattttcgaacagggcacagatgacgtccaaacagcatttaaatttgcgatgttgcagcacaatcaaaatatttccagtagaaaatttgaatttcaagcatatgttgacgttattaatactgcggatgcatttaaattgtctagattaatttgcactcaattttcaagaggtgtatattcgatgttgggagcagtttctccagattcatttgatacgctacattcctatagtaatacttttcaaatgccttttgtaacgccttggtttccagaaaaagtattagccccgtcatcgggatttatggactatgctatttcaatgcgacctgaataccacaaagccatcatagatacggttaagtattacggatggaggcagattatatatttatatgattctaatgatggtctcctaaggttacaacagatataccaaggattaactcctggcagtgagatttttcaagtcactactgtacggagaataaacaatgttagcgaagcattatcatttcttagaggaatagaagaacatactcgatggaccaacaaatatgtggttctagattgctctactgagactgctaaagaa

SEQ ID NO: 293 - DNA, 710 bp, Diabrotica virgifera
  misc_feature (1)..(710): RNAi target sequence
gctctgttatgtgcgtcaagaatttagaaattttatattatccgtaatggtggtcgaccgtgtgcattctaaaactattaaataatcatgtcgctagagactcgatctaattcagctctgtttaaaagagcagaccaactaaaacgttgggaagaatcagatacaaatcgagaaccagtgtcaccgaaacaaaaaactcggaaaattaaattttcttcgggatgtgtgtttctcgcggcttgtgctgctggtgataaaaaagaagtgttggaattgttacataaaggagctgacatcaatactgcaaatgtggacggattaacagccctacatcaggcatgtatcgacgacaatctcgacatggtggagttcctcgtggagaacggggcggacgtcaacaggggcgacaacgaaggttggacccctttgcacgccactgccagctgcgggtttctctcgatcgcgaagtacctcatcgaaaagggggcccacgtagcggcagttaataacgatggacaattggcacttgatattgccgagagccaaaaaatggaaggactactcagggaagaaattgaggatagaggcatcgactgcgaagcagctaggaacgaagaagaattggtgatgttgagggatgccaaagattggttagcgacaaaaagttccttagttaacgtaccacaccctaaaaacggagctacaccttt

SEQ ID NO: 294 - DNA, 22 bp, Artificial Sequence
  primer
  misc_feature (1)..(22): forward primer
gctctgttatgtgcgtcaagaa

SEQ ID NO: 295 - DNA, 23 bp, Artificial Sequence
  primer
  misc_feature (1)..(23): reverse primer
aaaggtgtagctccgtttttagg

SEQ ID NO: 296 - DNA, 3435 bp, Diabrotica virgifera
  misc_feature (1)..(3435): WCRW transcript ta00860.008_diavv
ttttatattatccgtaatggtggccgaccgtgtgcattctaaaactattaaataatcatgtcgctagagactcgatctaattcagctctgtttaaaagagcagaccaactaaaacgttgggaagaatcagatacaaatcgagaaccagtgtcaccgaaacaaaaaactcggaaaattaaattttcttcgggatgtgtgtttctcgcggcttgtgctgctggtgataaaaaagaagtgttggaattgttacataaaggagctgacatcaatactgcaaatgtggacggattaacagccctacatcaggcatgtatcgacgacaatctcgacatggtggagttcctcgtggagaacggggcggacgtcaacaggggcgacaacgaaggttggacccctttgcacgccactgccagctgcgggtttctctcgatcgcgaagtacctcatcgaaaagggggcccacgtagcggcagttaataacgatggacaattggcacttgatattgccgagagccaaaaaatggaaggactactcagggaagaaattgaggatagaggcatcgactgcgaagcagctaggaacgaagaagaattggtgatgttgagggatgccaaagattggttagcgacaaaaagttccttagttaacgtaccacaccctaaaaacggagctacacctttacatgtagcctgtgccaaaggttatgccgacgttataaaaatattattacaatgtggagctgacattgatgcgcaggatgttgacggctggacccctctacatgcagctgcgcactggggccaaaaggaaacgtgccaaatattggctgaaagtttggctgacatggaagctaaaaacttcgtaggacaaacagcatttgacttgtgtgatactgacatgttatcgacattggaagatcttaaggaaaaaaaaaaaaaaaaaaaaacgaattaatagaagaatggccaagaagagggccgatattaacgataggaatttggaatctgagacgcctaccaaagtgaaaaaggttgagctcgaagggacgaaagtgattagaaatatagaaaagaaaaataacctgaatgccaacaatgaaatcacaacgaacactactgtaccccagaagatcgttgaagacaaagaggatgttactttaaggaagaaaccgtatacaaaacagaattcagatttgagtccaacaaaactgaatagtacgaataatttgactaattccacggaatctataaagattgaaccagaagttactctcaggaaacctcctattgtacaaaatgaaaaaccgactaaaaaagaagacaacgatacaccggtcagtaccgctgcaaccacaaataccacaactaacatatcacaagaaaagacttcaccagtgactagtccacagcctactactaacaaccaacaacaattgcgaagcggtctaaagttgcaaatgccacctccgcctacaacaacggttaccgcccctacaccggtaacgaattcttccacgccctccactcctacaacgccgggaggaaccaggcttcagatgctcaaaaatttctttaagtcgtttgttcctccagtaagggatgaagaaagtgaaactcaaagaaaagcgcatgccaagagggtaagggagactcgacgatccactcagggggtaactttagaagaaatcaaatccgccgaacagttagtaaaacagaagaatcaacctggtggcggcaatgaggaaaagcctggagcaaatggagactcccccaacggaatcgtagttaccgccaccatcacaaccggtactcccacagttataacaactcgtgaaagtgaggaaccacccgcaatacacgaaaggcgaccatcgtggaggttgagggtagacaatggtaccagcaagttcttgttagaagacgcttcaaaaccttcggacccgccaaacacgccgtcgattattcgtaggaccatcgcatccatccaaagaccttcttcagcgcctctagagactgcagatactacaattacactgcctttaagaaaacccaaatccgtagaagaaaaagatcaagataaggagaacgatattagaaatgctcaagcaactctagccacacaagcagctattcaaaggagaagaaggccgaagaggagatcgacaggggtagtttcgtttgataatgttgatgatttggaacaggagaaggattcttcaagtggaaaagactgtgatgatactactaaaatgaatcatttggagagcggcacagaccgaagtagccgatcgagaattggtagttcttcggatattcgaaacgagaacggagaattggactacaaaaaactgtatgaacagcaactcgcagagaacgaccgactgaaagacaaattaaggaaatctgacgaggagttgcgagaaaccaaacaaactttggaaaaaattaacttggtcacaagtaaaaattccttatccgaactagaaaaacgcgaaaggagagccatggagagaaaacttagtgaaatggaagaggaactaaagcaattacaaaagttgaaagctgagaacgaacgcctaaaggccgacaacagatcactcacacgtgtcatcaataaacttaccaactctgcaatgtaatagaatttggaaaatcttaaatccgagaaccagaggttgaaggatgaaaatggtgctcttatcagagtgatcagcaaactgtcaaagtagcataagttttagttgttatcattcatgcattttatgttaaggtgactttaataatttattgttagaaaataatgaaaattcaggatttcccatttttattcacgttgaaagttagtttctttaacacagatttgtagtagttaaattgaatcgtactattgtggacgcgaatgaaaataggacgcgaaaaaaagaatatgaagctgaaatagaggctatcgagatggaaattgtaaagaaaatagcagatgaagaagaagtaacgagatcattaggtatataacaggtcacaaacaataaaagaatatacccagacacaaaaaaataaactaatgtgatcgtagattccagagacaactttaaagtaaatattactagcatccaagaaagatatggatataacacaccatataagagatatatccccgaaaaaaagtaaaactgttaagagaggatctacagtccttatctaaagaaactcaagttgtttaccgagttgtgtactttacgagttttttgcgtacttagaggttttttataaactgtacagaagtaaacaaatacttcataaaaacgtttctgtggggattgatactcggctattttaaatatatttattaaataaatacatgtttttttgtttatacctcataaaagtcattcttatgatccaaaaaaaacaaacaatccatttggcatacttattt

SEQ ID NO: 297 - DNA, 632 bp, Diabrotica virgifera
  misc_feature (1)..(632): RNAi target sequence
  misc_feature (610)..(610): n can be any nucleotide
ggacagtatggaagacgattgggctgtggataatcagagtggtggagttgtcgccccaaaaattgcagaactacctgaaattaagttgttcgctagatggaactgcgatgatgtccaagtttcagacatgtcccttcaggactacattgcagtgaaagaaaaaaatgcaaagtatttaccccattcagctggtagatatgctgcaaaaaggttccgtaaagcacaatgcccaatcgttgagaggttaacaaactctctaatgatgcatggacgtaacaatggtaaaaaattgatggctgtcagaattgttaaacatgcttttgaaattatccatttactaactggagaaaatccattacagattttagtttctgctattatcaattcaggacctagagaagattctactcgtattggtagagctggtactgtaagaagacaagctgttgatgtgtcacccttgagaagggttaaccaagcaatttggttgctctgcacaggtgctagggaagcagcattccgtaatattaaaactattgctgaatgtttggctgatgaattaatcaatgctgccaagggatcatcaaattcatatgctatcaaaaagaanggatgaacttgaacgtgtagcc

SEQ ID NO: 298 - DNA, 21 bp, Artificial Sequence
  primer
  misc_feature (1)..(21): forward primer
gacagtatggaagacgattgg

SEQ ID NO: 299 - DNA, 22 bp, Artificial Sequence
  primer
  misc_feature (1)..(22): reverse primer
ggctacacgttcaagttcatcc

SEQ ID NO: 300 - DNA, 806 bp, Diabrotica virgifera
  misc_feature (1)..(806): WCRW transcript ta21523.001_diavv
gcacgaggagcgattgccggagtggaagtcgctctcaaaaaaagagaaaattagaaaagcaaccttttccggttcacgccgtcgttcagcaagagcttgcgatttttatttttgaaaaatagagagtattctctaatatttaaggacagtatggaagacgattgggctgtggataatcagagtggtggagttgtcgccccaaaaattgcagaactacctgaaattaagttgttcgctagatggaactgcgatgatgtccaagtttcagacatgtcccttcaggactacattgcagtgaaagaaaaaaatgcaaagtatttaccccattcagctggtagatatgctgcaaaaaggttccgtaaagcacaatgcccaatcgttgagaggttaacaaactctctaatgatgcatggacgtaacaatggtaaaaaattgatggctgtcagaattgttaaacatgcttttgaaattatccatttactaactggagaaaatccattacagattttagtttctgctattatcaattcaggacctagagaagattctactcgtattggtagagctggtactgtaagaagacaagctgttgatgtgtcacccttgagaagggttaaccaagcaatttggttgctctgcacaggtgctagggaagcagcattccgtaatattaaaactattgctgaatgtttggctgatgaattaatcaatgctgccaagggatcatcaaattcatatgctatcaaaaagaaggatgaacttgaacgtgtagccaaatccaaccgttaaatttatttctcatttta

SEQ ID NO: 301 - DNA, 546 bp, Diabrotica virgifera
  misc_feature (1)..(546): RNAi target sequence
caagtagggctaaaatgaagcaaattgtaacaaaccaaacggtaaaaattcctgagggaattacagtaaccactaagtcaagggtagtaactgtaaaaggaccccgaggtaatctgaagagatccttcaaacatcttaccctggacattcgaatgatcaaccccaggttactgaaagtagagaaatggttcggtaccaagaaggaattagctgctgtcagaacagtatgctctcatgttgaaaacatgttaaagggtgttacaaaaggataccaatacaagatgagagcagcatatgctcactttcccattaactgtgtcaccactgaaggaaacacagttatcgaaattagaaatttcttgggagaaaaatacatcagaagagtaaagatggccccaggtgttacagtagtaaactccaccaaacaaaaggatgaacttatcattgaaggaaactcattggaggatgtttcaaagtcagctgcccttattcaacaatctacaacagttaaaaataaggatatccgtaaattcttagatgggcttt

SEQ ID NO: 302 - DNA, 23 bp, Artificial Sequence
  primer
  misc_feature (1)..(23): forward primer
caagtagggctaaaatgaagcaa

SEQ ID NO: 303 - DNA, 23 bp, Artificial Sequence
  primer
  misc_feature (1)..(23): reverse primer
aaagcccatctaagaatttacgg

SEQ ID NO: 304 - DNA, 789 bp, Diabrotica virgifera
  misc_feature (1)..(789): 02181.002_diavv
ggggaaaactcttcggaatagaagtcgctttttctgtccattttatgtcacaagtagggctaaaatgaagcaaattgtaacaaaccaaacggtaaaaattcctgagggaattacagtaaccactaagtcaagggtagtaactgtaaaaggaccccgaggtaatctgaagagatccttcaaacatcttaccctggacattcgaatgatcaaccccaggttactgaaagtagagaaatggttcggtaccaagaaggaattagctgctgtcagaacagtatgctctcatgttgaaaacatgttaaagggtgttacaaaaggataccaatacaagatgagagcagcatatgctcactttcccattaactgtgtcaccactgaaggaaacacagttatcgaaattagaaatttcttgggagaaaaatacatcagaagagtaaagatggccccaggtgttacagtagtaaactccaccaaacaaaaggatgaacttatcattgaaggaaactcattggaggatgtttcaaagtcagctgcccttattcaacaatctacaacagttaaaaataaggatatccgtaaattcttagatgggctttatgtatctgaaaaaacaactgttgtacaagaagaataacttgtatttttgaaataaatttaagtttatatttaaaaaaaaaaaaaaaaaatccgttcaacaatctacaacagttaaaaataaggatatccgtaaattcttagatgggctttatgtatctgaaaaaacaactgttgtacaagaagaataacttg

SEQ ID NO: 305 - DNA, 409 bp, Diabrotica virgifera
  misc_feature (1)..(409): RNAi target sequence
ctcttttgacaacggccaacgttctaaagttgcatcatggcgtcttcagaaggtgcaggcgtgactacaggtcaaccaaatttacacaaacaagatttatctaaattggatgttaaaagattgacggctttatctccagaagttataagtagacaagctaccattaacattggtacaattggacatgtagcgcatggaaaatcgactgtggttaaggccatatctggggtacaaactgtcagatttaagaatgaactggaaaggaacattaccattaagctaggttatgctaacgcaaaaatctacaaatgtgataatccgaaatgccccaggccctcctgctttatttcgggcagttcttcaaaggacgacagtttcccttgtttacgtccagcatgttcgggtagat

SEQ ID NO: 306 - DNA, 20 bp, Artificial Sequence
  primer
  misc_feature (1)..(20): forward primer
ctcttttgacaacggccaac

SEQ ID NO: 307 - DNA, 20 bp, Artificial Sequence
  primer
  misc_feature (1)..(20): reverse primer
atctacccgaacatgctgga

SEQ ID NO: 308 - DNA, 1691 bp, Diabrotica virgifera
  misc_feature (1)..(1691): WCRW transcript ta02330.001_diavv
ggacaagtgacgtgttttcatgaacgttagatgtcaaaattattggccgcctcttttgacaacggccaacgttctaaagttgcatcatggcgtcttcagaaggtgcaggcgtgactacaggtcaaccaaatttacacaaacaagatttatctaaattggatgttaaaagattgacggctttatctccagaagttataagtagacaagctaccattaacattggtacaattggacatgtagcgcatggaaaatcgactgtggttaaggccatatctggggtacaaactgtcagatttaagaatgaactggaaaggaacattaccattaagctaggttatgctaacgcaaaaatctacaaatgtgataatccgaaatgccccaggccctcctgctttatttcgggcagttcttcaaaggacgacagtttcccttgtttacgtccagcatgttcgggtagattccaattggtcagacatgtcagctttgtagattgccctggtcacgacattcttatggctaccatgcttaacggagccgctgtgatggacgcagcattgttattaatagcaggaaacgaatcatgtcctcaacctcaaactagtgaacatttggctgctatcgaaatcatgaagttgaaacacatcctcattcttcaaaataaaatagatttggtgaaggaagggcaagccaaggagcaacatgagcaaattgtgaaatttgtccaaggaactgtagctgaaggagcccctataattcccatatccgctcagttgaaatataacatcgaggttttgtgcgaatatatcactaaaaaaattccaataccaatgagagattttacttctgaaccaaggctgatcgtgatcagatcttttgatgttaataaacctggttgtgaagttaacgatttaaaaggaggtgtagctggtggcagtattttaagaggagtgttgaaggtgggacaagaaattgaagtaagacctggactagttagcaaggactcagaaggaaagctggcctgccgaccaatattctctagaatagtatctctatataccgaacaaaacgaactgcagtttgcagttccaggaggactcattggtgtcggtaccaaaatcgaaccaaccctttgcagagccgatcgacttgtaggtcaagttttgggagcagttggtgctctacctagtatctttacagaacttgaggtgagttactatctattgaaacgtttgctgggagtccgtacagaaggagacaagaaaggggccaaagtccagagattaaccagaagtgaagtactccttgtcaacattggatccctcagcacgggaggacgagttgtagccactaaggccgatttgtgcaagatcgctttaacgaatccagtctgtacggaaatcggcgaaaagattgcactcagtagacgtgttgaaaaacattggcgtctcatcggatgggggcagatccgcggaggggagacaatcgagcctaccacaagctaggctttttatactcgtaccggtcttttcaggacactttaagccaatttttgttttctatttaatatcgttttattaaagaagtgtttacgttttgtttatatcttttaggttgatttttattactgctatagtgtactgattatccgattcaaatataatgtctataaaactaaaaaaaaaaaaaaaaaa

SEQ ID NO: 309 - DNA, 670 bp, Diabrotica virgifera
  misc_feature (1)..(670): RNAi target sequence
attgcagtcattgctgtagtgcacacgtaatttaagtatttatttaagaattgtctgcaaataattaattataagatggctaaagccccagctgtaggtattgatttaggaaccacatactcctgtgtaggagttttccaacatggcaaagttgaaattattgccaacgaccaaggtaacagaaccacaccatcatatgtggccttcacagacacagaacgtctcatcggagatgctgccaagaaccaggtagccatgaaccccaataacacaatttttgatgccaaacgtcttattgggcgtcgctttgatgacagtgctgtacagtctgacatgaaacattggccatttgaagtagtaaatgatgcaggtaaaccaaagattaaagttgcatacaagggcgaagacaaatccttctacccagaagaagtcagttccatggtccttacaaaaatgaaggaaacagcagaagcatacttaggaaagaatgtcaccaacgctgtcatcacagtacctgcatatttcaatgactcacaacgtcaagctaccaaagatgctggaaccattgctggactccaggtattacgtattattaacgaacccactgctgctgccatcgcctatggtttagacaaaaagggccaaggtgaaagaaacgtcctcattttcg

SEQ ID NO: 310 - DNA, 22 bp, Artificial Sequence
  primer
  misc_feature (1)..(22): forward primer
attgcagtcattgctgtagtgc

SEQ ID NO: 311 - DNA, 22 bp, Artificial Sequence
  primer
  misc_feature (1)..(22): reverse primer
cgaaaatgaggacgtttctttc

SEQ ID NO: 312 - DNA, 2609 bp, Diabrotica virgifera
  misc_feature (1)..(2609): WCRW transcript ta00491.010_diavv
  misc_feature (19)..(19): n can be any nucleotide
  misc_feature (49)..(49): n can be any nucleotide
ggcccatggaactgacttnttctgggtagaaggatttgtctttcgcccnttgtatgcaaactttaatcttttggtttaccttgcatcatttattactttcaaatggccaatgtttcatgtcagactgtacagcactgtcatcaaagcgacgcccaataagacgtttggcatcaaaaattgtgttattggggttcatggctacctggttcttggcagcatctccgatgagacgttctgtgtctgtgaaggccacatatgatggtgtggttctgttaccttggtcgttggcaataatttcaactttgccatgttggaaaactcctacacaggagtatgtggttcctaaatcaatacctacagctggggctttagccatcttggggggatttgattgcagtcattgctgtagtgcacacgtaatttaagtatttatttaagaattgtctgcaaataattaattataagatggctaaagccccagctgtaggtattgatttaggaaccacatactcctgtgtaggagttttccaacatggcaaagttgaaattattgccaacgaccaaggtaacagaaccacaccatcatatgtggccttcacagacacagaacgtctcatcggagatgctgccaagaaccaggtagccatgaaccccaataacacaatttttgatgccaaacgtcttattgggcgtcgctttgatgacagtgctgtacagtctgacatgaaacattggccatttgaagtagtaaatgatgcaggtaaaccaaagattaaagttgcatacaagggcgaagacaaatccttctacccagaagaagtcagttccatggtccttacaaaaatgaaggaaacagcagaagcatacttaggaaagaatgtcaccaacgctgtcatcacagtacctgcatatttcaatgactcacaacgtcaagctaccaaagatgctggaaccattgctggactccaggtattacgtattattaacgaacccaccgctgctgccatcgcctatggtttagacaaaaagggccaaggtgaaagaaacgtcctcattttcgatctgggtggtggtacttttgatgtatcaatcttaacaattgaagatggtatctttgaagtcaaatcaactgctggagacactcacttgggaggtgaagacttcgacaacagaatggtcaatcactttgttggagaattcaagaggaaatacaagaaggaccttaccacaaacaaacgtgccctccgtcgtttgagaacaagctgtgaaagagctaagcgtaccctttcctcatcaacccaagccagcattgaaatcgattctctatttgagggtattgacttctacacctcaatcaccagggctagatttgaagaactcaacgctgatttgttcagatctaccatggaacctgtagaaaaggccatcagggatgccaagatggacaaatctcaagttcacgatattgtgttggttggtggatctacccgtattccaaaggtacaaaaactgttgcaagatttcttcaatggtaaagaattgaacaagtcgatcaaccccgatgaagctgttgcttatggtgcagccgtccaagccgccatcttgcacggagataagtctgaggaagtacaggacttgctcttgctcgatgtcactccactctcattgggtattgaaactgccggaggtgttatgactgccctcatcaaacgtaacactaccattcccaccaagcaaacccagaccttcactacttactctgacaaccaacccggagtacttattcaggtatatgaaggtgaacgtgccatgaccaaggacaacaacctcttgggaaaattcgaacttactggcattcctcctgcgccccgtggtgtccctcagattgaagtaaccttcgacattgatgccaacggtatcttgaacgtcacagctattgaaaaatccaccaacaaagaaaacaagatcaccatcaccaatgataaaggtcgtctcagcaaagaagacattgaaagaatggtcaacgatgcagaaaaataccgtaacgaagatgataagcaaaaggctaccatctctgccaagaacgtcctcgaatcatactgtttcaacatcaagagcaccatggaagatgacaaaatcaaggacaagatcagcgaaagtgacaaaactaccgtcatggagaaatgcaacgaggttattgcttggttggatgctaaccaattagccgacaaggaagaatatgaacacaaacaaaaggagctcgaaaacatctgcaaccccatcatcaccaagttgtaccaaggtgccggtggagctccaggtggcatgcccggtggtttcccaggtggagcagctccaggagctgcaggcgccgctggaggtgctggaccaaccattgaagaagtcgattaaactattcattccattttttaaacttttgttaaccgttgtgcagtattacttgcagacaaagctttttaaaattactttttttacacaatttttcaattgttaaacaacgtttttggtaacagttcaaaaattactgcaataattatgttcgttcatgaataaaataaaaagtcaaatccgaaaaaaaaaaaaaaaaa

SEQ ID NO: 313 - DNA, 672 bp, Diabrotica virgifera
  misc_feature (1)..(672): RNAi target sequence
  misc_feature (648)..(648): n can be any nucleotide
  misc_feature (649)..(649): n can be any nucleotide
tacacgtaaaaatggcttcgacgatatcggcaagacaggctaacagagaacatgttttggccgtatccagagacttcatatcccaaccaagactcacttacaaaactgtatctggtgtcaacggtccactagtaatcctcgaagatgtcaaatttcctaagttcaacgaaattgtccaactcagattatctgacggaagtttaagatcaggtcaagtacttgaagtcagcggttccaaggctgtagtacaagtattcgaaggtacatcaggtatcgatgccaaacacactgtctgtgagttcacaggagatattctcagaactccagtctctgaggatatgttgggaagagtattcaacggctctggaaaacctattgacaaaggtcccccaattctggctgaagactacctagatatccaaggacaacccatcaacccatggtcccgtatctacccagaggaaatgatccaaactggtatcacagctatcgatgtgatgaactcgattgcccgtggtcagaagattcccattttctcagctgctggtctgccacataacgatattgctgcccaaatttgtaggcaagccggtcttgtcaaaatcccaggcaaatcagttttggatgaccacgaagannctttgccatcgtgttcgctgctatgggtgttaa

SEQ ID NO: 314 - DNA, 22 bp, Artificial Sequence
  primer
  misc_feature (1)..(22): forward primer
tacacgtaaaaatggcttcgac

SEQ ID NO: 315 - DNA, 21 bp, Artificial Sequence
  primer
  misc_feature (1)..(21): reverse primer
ttaacacccatagcagcgaac

SEQ ID NO: 316 - DNA, 2583 bp, Diabrotica virgifera
  misc_feature (1)..(2583): WCRW transcript ta00620.001_diavv
tcttaaacttccgtcagatgggggcagttgctaattttttactgtctttgatagacgtctcctgtacacgtaaaaatggcttcgacgatatcggcaagacaggctaacagagaacatgttttggccgtatccagagacttcatatcccaaccaagactcacttacaaaactgtatctggtgtcaacggtccactagtaatcctcgaagatgtcaaatttcctaagttcaacgaaattgtccaactcagattatctgacggaagtttaagatcaggtcaagtacttgaagtcagcggttccaaggctgtagtacaagtattcgaaggtacatcaggtatcgatgccaaacacactgtctgtgagttcacaggagatattctcagaactccagtctctgaggatatgttgggaagagtattcaacggctctggaaaacctattgacaaaggtcccccaattctggctgaagactacctagatattcaaggacaacccatcaacccatggtcccgtatctacccagaggaaatgatccaaactggtatcactgccatcgatgtgatgaactcgattgcccgtggtcagaagattcccattttctcagctgctggtctgccacataacgatattgctgcccaaatttgtaggcaagccggtcttgtcaaaatcccaggcaaatcagttttggatgaccacgaagacaactttgccatcgtgttcgctgctatgggtgttaacatggagactgctagattcttcaaacaagatttcgaagaaaatggttctatggaaaacgtatgtttgttcttgaacttggctaacgatccaaccatcgaaagaatcatcaccccacgtcttgctctaacagccgctgaattcttggcttaccagtgcgaaaaacacgtgttagtcattttaactgacatgtcttcatacgctgaagctttgcgtgaggtatctgccgccagagaggaagtacccggtcgtcgtggtttccccggttacatgtacaccgatttggccaccatctacgaacgtgccggtcgtgtcgaaggccgtaacggttccatcactcaaatccccatcttgactatgcctaacgacgatattactcaccctattcccgatttgacaggttatattaccgaaggacagatctacgtcgaccgtcaattgcacaacaggcagatctacccaccaattaacgtactgccatctctctcacgtttgatgaagtctgctatcggcgaaggtatgaccaggaaggaccactctgacgtttctaaccaattgtatgcttgttatgctatcggtaaggacgtccaggccatgaaagccgtagtaggtgaagaagctctaacacccgacgatcttctctacctcgagttcctaacgaaattcgaaaagaacttcatcacccaaggaaactacgaaaaccgcaccgtcttcgagtctttggacatcggctggcaactactccgtatcttccctaaggaaatgttgaaacgtatccctgcaagcacattggcggaattctatccaagagactctcgtcactagttggtttatgtataaaatttatatatatttaggaagtttgttaggtttgttacaaatatgtccacttattgtatcgattattttcaattgagagatattttaccaaaacaatttgagccgatgagattctacggtgtaatttttgtaaatacttaaagagcgtgtttcaaaaatgcgcttaatataatatattatcaatacagagcaacctttttttctttattattttttcttgttgaacaatatataaagttcttgaactccctaagtggaacatagagcttcagtgaaaatgcaccatcacctcattccaagactttccttgacttcttaccaattgttggacaattataactcagattaattttactaggtgacagttccataagtaaaaatatgcaatggctatatattgcgtactaaacttaagaagaaaaattgtgtcgctctggaagaaagattacttgcataagaatgaaaatcagtgtcatattttgcgtttatgacatccctagacgatactattttttcgttactatattttttttaaagagatcaagagcaacaatttggagactgatattcttatgcgagttgttttcctactttgtcctattttgaagagtctacaattatttacttaccatttgattaaattagatgaacataagacaatactatatttttatcatgtaagttgatattccctatgtaaattattggcacaatgtaacctccaacttgatttatacatttattttacttttgtttgtctattttttctgtaatagagtggaagaattaacattccattaaatgtcattgcccaatgtataaagcaatatacctcttaccattcgatgctttttcagtattttaattctagatggtgaacggagatttttcttgatgtaggttttgacattttcgatgttactgtaaaaatctaattttatgttaaatagattagtgtacaaaaatgtgaataaacactatacatatgttaaaaaaaaaaaaaaaaaa

SEQ ID NO: 317 - DNA, 500 bp, Diabrotica virgifera
  misc_feature (1)..(500): RNAi target sequence
actttgacgagaggcgttgttagttacttcgttgtgtcgacatttttctgtttagtgtaccgattaatcttcaaatattacaatggctgaccaactcaccgaagaacaaattgccgaattcaaagaagctttctcactattcgataaagatggtgatggtacaattacgactaaagaattaggaacagtaatgagatctctaggacaaaatccaacagaggctgaattacaggatgtgaccaatgaagtagatgccgatggtaacggcacgatcgatttcccagaatttttaacgatgatggcacgtaaaatgaaagataccgatagtgaggaagaaattcgtgaagcattccgagtgttcgacaaagacggcaatggtttcatctcagcagcagaattgcgccacgtcatgaccaacttgggtgaaaaattgacagacgaagaagtcgatgaaatgattcgggaggccgatatcgatggtgatggtcaagtcaattacg

SEQ ID NO: 318 - DNA, 20 bp, Artificial Sequence
  primer
  misc_feature (1)..(20): forward primer
actttgacgagaggcgttgt

SEQ ID NO: 319 - DNA, 22 bp, Artificial Sequence
  primer
  misc_feature (1)..(22): reverse primer
cgtaattgacttgaccatcacc

SEQ ID NO: 320 - DNA, 713 bp, Diabrotica virgifera
  misc_feature (1)..(713): WCRW transcript ta02046.005_diavv
gcagcagcagttcccccctctcttctcttacgtcgatcctaaacaaaacgagaaaagacagttggctggtgcactttgacgagaggcgttgttagttacttcgttgtgtcgacatttttctgtttagtgtaccgattaatcttcaaatattacaatggctgaccaactcaccgaagaacaaattgctgaattcaaagaagctttctcactattcgataaagatggtgatggtacaattacgactaaagaattaggaacagtaatgagatctctaggacaaaatccaacagaggctgaattacaggatatgatcaatgaagtagatgccgatggtaacggcacgatcgatttcccagaatttttaacgatgatggcacgtaaaatgaaagataccgatagtgaggaagaaattcgtgaagcattccgagtgttcgacaaagacggcaatggtttcatctcagcagcagaattgcgccacgtcatgaccaacttgggtgaaaaattgacagacgaagaagtcgatgaaatgattcgggaggccgatatcgatggtgatggtcaagtcaattacgaagagtttattagaagtcacctcttggccaactaagatattattgattacaaagaaaaatagaagaatatattataatttacagatactatattaatgataatagaataagaataaaatgtaaataaatagttttgctcat

SEQ ID NO: 321 - DNA, 514 bp, Diabrotica virgifera
  misc_feature (1)..(514): RNAi target sequence
tttggcaacattgtgtatgatgtcataggagcggggtcagataggaatgttgtagttttgaatgatatacacatagatataatggactatatagtgcctgctagttgtacagatagcgagtttatgagaatgtgggcggaatttgaatgggaaaataaggtaaccgttaacacacccctcacggaactttcagaatacctcgaacatctactcaaaagcacaaatttgaaatgtttaacatcagaaaaagctctgagcgggcagtgtggttttatggcagccaatttatatgcaaaatccatttttggagaagacgctttggccaacttaagtatagagaaaccttttaataaacccgatgcgccagtaagcggtcatattagaataagggccaaaagtcagggcatggccttaagtttaggagacaaagtcaatatgacacagaagagcacacaacataaagtagtagctgcataaataaaaacgtttttttctgtttcaacccttttcttca

SEQ ID NO: 322 - DNA, 22 bp, Artificial Sequence
  primer
  misc_feature (1)..(22): forward primer
tttggcaacattgtgtatgatg

SEQ ID NO: 323 - DNA, 23 bp, Artificial Sequence
  primer
  misc_feature (1)..(23): reverse primer
tgaagaaaagggttgaaacagaa

SEQ ID NO: 324 - DNA, 3271 bp, Diabrotica virgifera
  misc_feature (1)..(3271): WCRW transcript ta00934.001_diavv
gggggtcgcatcaaaacgtcaacaatctgacacgtctgtaatgtttagcctgaattttgagtaaaattaccgaaaaacataattaaaattgatttattaagagtacataataacgtacgaaaatgaccgcggtagaacaaccttgttacacactaataaacttgccaacagattcggagccctacaatgaaatgcaactaaaaatggatttagaaaagggtgaggttaaagtaaaaataagagcattagaaaaaataattcacatgattctggcaggagaaaggttgccgaatggattcctaatgaccatcataagaaacgttttacctctacaagatcatttggcaaaaaaactattattgattttctgggaaatagttccaaaaacaaatccagaaggtaaactactacaagagatgattttggtatgtgatgcctatagaaaagatctgcaacacccaaatgaatttttgagaggttctacacttcgcttcttgtgcaaactgaaggaaccagaattgttggaaccattaatgcccagtattagagcttgtttggatcataggcacagctatgtgaggaggaatgctgtactggcaatttttaccatttacaaaaattttgaagccctcattccagatgctcctgaactgatctccaattatttggatggtgagcaagacatgtcttgtaaaagaaatgcgtttttaatgcttcttcatgctgaccaagaaagggcgttgtcgtatttggcatcatgtttagatcaagtaaattcatttggagatattctacaactggtcatcgttgagttgatatataaggtgtgtcattccaatcctgcggaaagatctagatttattagatgtatatataacttgttgaactcaagcagtcctgctgtcaggtacgaagctgcaggaactttagtcaccctctccagtgccccgactgccgttaaagctgctgctagctgttacattgagttaattatcaaagaaagtgacaacaatgtaaaactcatcgttttggacaggctgatagcacttaaggagcttcctaatcacgaaagaattctgcaggatttagttatggacatactgagagtactctctgctcctgacttagaagtccgcaagaagactttaagtctagcccttgaattagtctcttcacggaacatagaagaaatggtattagtattaacaaaggaagtgagtaaaacggtagacagtgaacatgaggatacaggaaagtacaggcaattgttagtaaggactctacattcgtgttccattaagttcccagatatcgcacgtagtgttataccagtcttgattgaatttttatccgataataatgaactggctgccacagatgtattgctgttcttaagggaagccatacagaagtttaaagaattgcaaccgttaattattgagaaactcatcgaaactttcaaagacattaaattggtcaaagtccatagagcagcaatttggattttgggagaatacgcgagtactgcttccgatatagaagttatcgttggagaaattaacagattgttgggtgaaggatccctcgttgaagctgagcagaagttaatagcaggagatacggaagagaatgctcctgcacctgctgcaggcgccaccactttagttacttccgatggaacatatgctacccaatcagctttcaacactgtcagccaaaccactaaagaagcacgacctcctctaagacaatacctcatggatggtgattttttcatcggagcctctttggcatctacattaaccaaactgtctttgcggtatgaggacctcacctctcctgctgctagcaatggattcaatgccaaaattatgcttattatggctggaattcttcacttgggaaaatcaggacttcccacaaaatcaataaccaacgacgataaagaccacattctgttctgtttacgagtcctatctgatcgttctccaatcattgttgaaattttcaaaaaattgtgccgctcggcactaaatgagatgcttctagctaaggaatcggtagaagcgatctcgcaaaagagcaaagaaaaaaacaagcgtacgattcaaactgacgacgctataagcttcctgcaattagagacagataaaagtggagagctaggagaaaacgtattcgagatgtcgctgtcacaagctttagtaggaggtcgaacgggaggtggcgaatcagtattaagttccaataaattagataaaatcacacaactgactggtttttccgatccagtttattccgaagcatacgttcacgtgaatcagtacgatatcgtgcttgatgtcttaatcgtaaaccaaactaacgatactttacaaaactgcacgctagagctggctactttaggcgatttgaagttggtagagaagccacaacctgtcgtattggcgcccaaagacttttgcaacattaaagctaacgtgaaagtggcctcaactgaaaacggaattatatttggcaacattgtgtatgatgtcataggagcggggtcagataggaatgttgtagttttgaatgatatacacatagatataatggactatatagtgcctgctagttgtacagatagcgagtttatgagaatgtgggcggaatttgaatgggaaaataaggtaaccgttaacacacccctcacggaactttcagaatacctcgaacatctactcaaaagcacaaatttgaaatgtttaacatcagaaaaagctctgagcgggcagtgtggttttatggcagccaatttatatgcaaaatccatttttggagaagacgctttggccaacttaagtatagagaaaccttttaataaacccgatgcgccagtaagcggtcatattagaataagggccaaaagtcagggcatggccttaagtttaggagacaaagtcaatatgacacagaagagcacacaacataaagtagtagctgcataaataaaaacgtttttttctgtttcaacccttttcttcattttaaatcatattctgtaatttaattaatttaatatcatattactggttacacattgttagattataaatatcttttaaagaataaaatttatttagcttttacaaagagcggaaagcaatctttatcttcttctaataagatcaacataaagttttctggaaaatataatatataatttaaaaatgtttagcatttattagtgaaatacatggcttactattttgatgacaaagtcagtgta

SEQ ID NO: 325 - DNA, 606 bp, Diabrotica virgifera
  misc_feature (1)..(606): RNAi target sequence
  misc_feature (577)..(577): n can be any nucleotide
gccctcatcaaacgtaacactaccattcccaccaagcaaacccagaccttcactacttactctgacaaccaacccggagtacttattcaggtatatgaaggtgaacgtgccatgaccaaggacaacaacctcttgggaaaattcgaacttactggcattcctcctgcgccccgtggtgtccctcagattgaagtaaccttcgacattgatgccaacggtatcttgaacgtcacagctattgaaaaatccaccaacaaagaaaacaagatcaccatcaccaatgataaaggtcgtctcagcaaagaagacattgaaagaatggtcaacgatgcagaaaaataccgtaacgaagatgataagcaaaaggctaccatctctgccaagaacgtcctcgaatcatactgtttcaacatcaagagcaccatggaagatgacaaaatcaaggacaagatcagcgaaagtgacaaaactaccgtcatggagaaatgcaacgaggttattgcttggttggatgctaaccaattagccgacaaggaagaatatgaacacaaacaaaaggagctcgaaaacatctgcnaccccatcatcaccaagttgtaccaaggt

SEQ ID NO: 326 - DNA, 22 bp, Artificial Sequence
  primer
  misc_feature (1)..(22): forward primer
gccctcatcaaacgtaacacta

SEQ ID NO: 327 - DNA, 22 bp, Artificial Sequence
  primer
  misc_feature (1)..(22): reverse primer
accttggtacaacttggtgatg

SEQ ID NO: 328 - DNA, 2209 bp, Diabrotica virgifera
  misc_feature (1)..(2209): WCRW transcript 454run12_isotig00560
gatttgattgcagtcattgctgtagtgcacacgtaatttaagtatttatttaagaattgtctgcaaataattaattataagatggctaaagccccagctgtaggtattgatttaggaaccacatactcctgtgtaggagttttccaacatggcaaagttgaaattattgccaatgaccaaggtaacagaaccacaccatcatatgtggccttcacagacacagaacgtctcatcggagatgctgccaagaaccaggtagccatgaaccccaataacacaatttttgatgccaaacgtcttattgggcgtcgctttgatgacagtgctgtacagtctgacatgaaacattggccatttgaagtagtaaatgatgcaggtaaaccaaagattaaagttgcatacaagggcgaagacaaatccttctacccagaagaagtcagttccatggtccttacaaaaatgaaggaaacagcagaagcatacttaggaaagaatgtcaccaacgctgtcatcacagtacctgcatatttcaatgactcacaacgtcaagctaccaaagatgctggaaccattgctggactccaggtattacgtattattaacgaacccactgctgctgccatcgcctatggtttagacaaaaagggccaaggtgaaagaaacgtcctcattttcgatctgggtggtggtacttttgatgtatcaatcttaacaattgaagatggtatctttgaagtcaaatcaactgctggagacactcacttgggaggtgaagacttcgacaacagaatggtcaatcactttgttggagaattcaagaggaaatacaagaaggaccttaccacaaacaaacgtgccctccgtcgtttgagaacaagctgtgaaagagctaagcgtaccctttcctcatcaacccaagccagcattgaaatcgattctctatttgagggtattgacttctacacctcaatcaccagggctagatttgaagaactgaacgctgatttgttcagatctaccatggaacctgtagaaaaggccatcagggatgccaagatggacaaatctcaagttcacgatattgtgttggttggtggatctacccgtattccaaaggtacaaaaactgttgcaagatttcttcaatggtaaagaattgaacaagtcgatcaaccccgatgaagctgttgcttatggtgcagccgtccaagccgccatcttgcacggagataagtctgaggaagtacaggacttgctcttgctcgatgtcactccactttcattgggtattgaaactgccggaggtgttatgactgccctcatcaaacgtaacactaccattcccaccaagcaaacccagaccttcactacttactctgacaaccaacccggagtacttattcaggtatatgaaggtgaacgtgccatgaccaaggacaacaacctcttgggaaaattcgaacttaccggcattcctcctgcgccccgtggtgtccctcagattgaagtaaccttcgacattgatgccaacggtatcttgaacgtcacagctattgaaaaatccaccaacaaagaaaacaagatcaccatcaccaatgataaaggtcgtctcagcaaagaagacattgaaagaatggtcaacgatgcagaaaaataccgtaacgaagatgataagcaaaaggctaccatctctgccaagaacgtcctcgaatcatactgtttcaacatcaagagcaccatggaagatgacaaaatcaaggacaagatcagcgaaagtgacaaaactaccgtcatggagaaatgcaacgaggttattgcttggttggatgctaaccaattagccgacaaggaagaatatgaacacaaacaaaaggagctcgaaaacatctgcaaccccatcatcaccaagttgtaccaaggtgccggtggagctccaggtggcatgcccggtggtttcccaggtggagcagctccaggagctgcaggcgccgctggaggtgctggaccaaccattgaagaagtcgattaaactattcattccattttttaaacttttgttaaccgttgtgcagtattacttgcagacaaagctttttaaaattactttttttacacaatttttcaattgttaaacaacgtttttggtaacagttcaaaaattactgcaataattatgttcgttcatgaataaaataaaaagtcaaatccgc

SEQ ID NO: 329 - DNA, 718 bp, Diabrotica virgifera
  misc_feature (1)..(718): RNAi target sequence
gttgggattgggatttaacaaatacgtcgttctaaatttctaaaactgcatacaaaaaatccttaaaaaactagtgaagattactaaagtgcaatagatacaaaaacaatatttttacgtattcaccataataatataaacgtagaaaatgaatcccgagtatgattatttattcaaacttctgctgattggagattcaggagtaggaaaatcttgtcttctactgagatttgcagatgatacctacacagaaagctatattagtaccattggcgtagattttaaaatcaggacaatcgatttagatggaaagacaattaaattgcaaatttgggatacagcaggtcaggaaaggtttagaacgattacatcaagttattaccgaggagcacatggtattattgtagtgtacgattgcacagaccaagattcattcaataacgttaaacaatggctcgaagaaatcgaccgttatgcgtgtgacaatgtaaacaaattactggtagggaataaaagcgatttgacaactaagaaagttgtcgacttcactacagccaaggagtatgccgaccaattgggtataccatttttggaaacctcagctaagaatgcaaccaatgtagaacaggcctttatgactgtggccgctgaaataaaaaatagagtaggacctccatcttctgcggtagaccaaggaaataaggttaggttcgatcaa

SEQ ID NO: 330 - DNA, 22 bp, Artificial Sequence
  primer
  misc_feature (1)..(22): forward primer
gttgggattgggatttaacaaa

SEQ ID NO: 331 - DNA, 24 bp, Artificial Sequence
  primer
  misc_feature (1)..(24): reverse primer
ttgatcgaacctaaccttatttcc

SEQ ID NO: 332 - DNA, 4464 bp, Diabrotica virgifera
  misc_feature (1)..(4464): WCRW transcript ta00232.001_diavv
gaatcaaggggttgggattgggatttaacaaatacgtcgttctaaatttctaaaactgcatacaaaaaatccttaaaaaactagtgaagattactaaagtgcaatagatacaaaaacaatatttttacgtattcaccataataatataaacgtagaaaatgaatcccgagtatgattatttattcaaacttctgctgattggagattcaggagtaggaaaatcttgtcttctactgagatttgcagatgatacctacacagaaagctatattagtaccattggcgtagattttaaaatcaggacaatcgatttagatggaaagacaattaaattgcaaatttgggatacagcaggtcaggaaaggtttagaacgattacatcaagttattaccgaggagcacatggtattattgtagtgtacgattgcacagaccaagattcattcaataacgttaaacagtggctcgaagaaatcgaccgttatgcgtgtgacaatgtaaacaaattactggtagggaataaaagcgatttgacaactaagaaagttgtcgacttcactacagccaaggagtatgccgaccaattgggtataccatttttggaaacctcagctaagaatgcaaccaatgtagaacaggcctttatgactatggccgctgaaataaaaaatagagtaggacctccatcttctgcggtagaccaaggaaataaggttaggttcgatcaaagtcgcccagtcgaaacaaccaaatccggttgctgctgaaaatatttagttctctttggttgaaggtggtcactcatgtcatctcttttgtacggtagcagcgctacagttactcttattctagtaatatccgtctgtatgtatagttattttaaagtttttgatttgattttcactttagatttttttttcaaaaatatagaaaacaccaatatctcttagcctaatcttaactcccttagataaatatgtaattaacaaaaatatttataaaaccatttttactaaactattagtccacagtatatcgttccttttcaggaatgattgcaaaagtcttaaaaatggttttaattgtttcgtttaaacgagtctaccactttatgaaaaatttcagaaagattatacgttgaaataaaataaattatttttgtcggacaaaaaagaggggcaaacacccgcaagatgtcactctagcgcggtacagttttgttaattacaaaactcataattttcaattgaaagtattgataattactaaatattgtggatctcttgtccgacaaatttgcagcctcgtttctttagtaggacaacggaaatatgttaattatggtaggttatggtttgcggttacaaaagtcataattttaattttttaacgttcaaactgttcaaaaagtaattgtccgacaaaaaaattgttcgacgcaaacttataacaaaaacagtgacagtctacttgtgtttgtcggtataatcgcaaattacctacctctagtatagatgcttagtctagtaattagtctgttccgctctgcggaattgagtaaatggaattaattaaaaataagtgtaaactatgaacaataatatatttatttgtgtcgataaaaagacgtgttttgctcgaaagggtgtgttgttgacgcaccgcatctatcccgacgcccgctggggtgtgactgccgacgggaggttgtaaatcgacccgtggttatgtatcgactgacgctgtggctgaaaaaaaccacaaacgctaatatgtttgtacttctaacatctggccagaaaagcgataaattactacatctgtagttttaagaaacgtcttcgaatgcatttccatgcattgacatggaatctgataaggtaattaattcatggggaattcagtttgttaaactgaacacaccaaaaatatggttagggatacatttcgtttcgtaaaacttcttagcatctggtttgtatattaaatgtgaatttatatgaccgttttgagaaatgatattaaaaaataaaattagcaaaaatagtaattaaagcgtgtcgccacaagtctatgtttacattcggtttctatacattttctgacgttctaaacgtcactggcataacagtctaaacagtgcaacaagtaaagggtccagggctatgttagctcaatttatctagtactgtggcggttgcagtaaaaaaagttttgaaattaatttgtcggactggctatctgatacccaatttttgtcggacattgctctatttggataaagaaccctccaatctatcactttcgtgttcgaaattttataatcgcaatctgcataattgttaattattaacatatttgcgttgttcggctaaagaggggaggctgcaaatttgtctgacaagagatcaacaatctagtaattaattattaataaactaaaagtgggtagttccctgggttggctgtataccatgtagttaaaaaactctaaacatgtagtaaggccacttctgtgtaaaaggtgtatgtactgaaattttaaaaatcccgatggattgaataaactaggttcattcagaacgttttcggacctgtcagtccatcatcagtgaattcatatatacttgcgctaactagtcccagaaccaaacaatggttgtacttataaatcaatctacattatagtgttatgtatttggaaaggctaagcgccgatgttctgatggactgataggtccgaaaacgttctgaattggaacctattttaatcaattcattgggatttttagggttgtagtagatataccttttacacagaagtggttttatttcatgttttttgtccgacgaaaataatttattttattctaacgcgtaattttttgattaaaattaaaaattatagttttgcaatctcaaaacaaccgcgctagagctacaggtttaaaaggaagtcatcaaaaccatttttaagacttttgtaatcatttttgaaaaacgacgatatactgtggactacatatatgagatcattagaacgagaaagatatactcatcgactgttaattttgtattgtttttagtatacctttctctgttttataaatccagatcatgatagattgacgttagaaattattgttcgcttttcaaacgtgtattagcagaattttggcaaattaaatataaaaattcgagatcctttataaaaaggtatatttaaaattccctaagtaagggttatattaagtaacagaacgttttcggattaaaaaatccaccatcagtgttacaaaaaaaaaatagcatgcctgaggcaccgaaatgttacgggtaaaaaccctttaaatgttgacagttgttgtcttatactatgatgttgctaatattcctggatattacccagggcaacacaggactcttcccacgcggttggaatttgagaatttcaatcacgaatttgacacttccaaaatacgtaaagttttccacatctttaatctgcatgttgtgaatagtaaatagagtgtcgttccttgcattggttctcatggacttgattttactaatattaattttcaaatctattttattggcttcagtggaaagtgaattttgaaaaaaaatctgctaaaaatagtttaaaaaatatttttttttagttgtgacactatacagataaaataacgaaaaatttacgaaataatatttatcaaaagtggctcttgcagtacagaatataatatcattattattatctagttaatagactcgtactttttaacgatgtaactttaaaaacaattaacaacgttaaaaaaatactgcaaaaaggaagataaataagtgataaatgtgtcacttttcttgagcactacgcagattgtttggaataaagctatcacgtattatactgtgtaaactccacaaacgacactttatacacatcttagatgaacaaatgcctggcacaagtcgatatgtgacactgtttatgttcggtgcaccgtcagttttggttaatcattagtgtcagctaacgaaaatactttaactataaacttgacactttttgagataagattttgtagttttattaaactgttggtgcaataaaaccgtttttaaaattttttgagttgtgacactatttgagcggaggtgcgacatgtggaaaatatttacaattatttcatatatcacttgttctatacaataaaaaaacgtcatttctaacatgatttttagtgatttctgttggtccaaaacaatttattatattatccatatatacttgttattttttatgtaatgatttttcttattcgctacacattaacgtcattttttgtttatatcaaataaaaagtaatattgtaagtaatatgtgattgtaaatcttggtcaataggttttttgtaaattaaagttattctgaactggaaaaaaaaaaaaaaaaaa

SEQ ID NO: 333 - DNA, 704 bp, Diabrotica virgifera
  misc_feature (1)..(704): RNAi target sequence
ttttgggtgtgaatctgtctatttaatttactcctcctggttaaaaaataaacattagtagattatatctagggtgctcggtaaaaggagtataagtcaaaaatggtcaaaatattatttttgcagaataagactataaaggactatatctttaccttggtatcaatagaacaagtcaatatgctaacataaattaaatcaaattaattggtctttttagtacaactacttaaatgaacttttaatttggtaacaacagtttatgtcaacttatactgtttatacacttcgagtttgtgaactattcttggctctaatagtacatgtcgacatatgtactgttttgaccattgatactgaataatatccaagtaagacggtcgacttatactaagacgatcgctttcagatacgtgtgtcaagcttactaagcaaatattactcttttctgtacgagattttcaagaaacaactgataactattcgcgtttggctgataactaaaccgtgggaattttaccaattaaagattacacttaatagggacagcgagaataagtaatactaacttcttacgtaggtttaatttgataaaaatagatgagtaagtggtttattttctggaccactgtgcaatatgggtgatcgtaacaaacgtgttgcatatattgttagccttatagactccgaaccacctaaaatca

SEQ ID NO: 334 - DNA, 24 bp, Artificial Sequence
  primer
  misc_feature (1)..(24): forward primer
ttttgggtgtgaatctgtctattt

SEQ ID NO: 335 - DNA, 22 bp, Artificial Sequence
  primer
  misc_feature (1)..(22): reverse primer
tgattttaggtggttcggagtc

SEQ ID NO: 336 - DNA, 737 bp, Diabrotica virgifera
  misc_feature (1)..(737): WCRW transcript ta41917.001_diavv
gggattattctagtgacttttttgggtgtgaatctgtctatttaatttactcctcctggttaaaaaataaacattagtagattatatctagggtgctcggtaaaaggagtataagtcaaaaatggtcaaaatattatttttgcagaataagactataaaggactatatctttaccttggtatcaatagaacaagtcaatatgctaacataaattaaatcaaattaattggtctttttagtacaactacttaaatgaacttttaatttggtaacaacagtttatgtcaacttatactgtttatacacttcgagtttgtgaactattcttggctctaatagtacatgtcgacatatgtactgttttgaccattgatactgaataatatccaagtaagacggtcgacttatactaagacgatcgctttcagatacgtgtgtcaagcttactaagcaaatattactcttttctgtacgagattttcaagaaacaactgataactattcgcgtttggctgataactaaaccgtgggaattttaccaattaaagattacacttaatagggacagcgagaataagtaatactaacttcttacgtaggtttaatttgataaaaatagatgagtaagtggtttattttctggaccactgtgcaatatgggtgatcgtaacaaacgtgttgcatatattgttagccttatagactccgaaccacctaaaatcactagaaaaaggacc

SEQ ID NO: 337 - DNA, 221 bp, Diabrotica virgifera
  misc_feature (1)..(221): RNAi target sequence
aatgaaaaacataataacggaagccaaaaaattccgacttaaaataaatgaagaaaagacaaagtatatgataatgggagagatccaaaaagaaaaagagaataacatcatagtacaaatagatggagaaaaaacatactcgttcaaaagagccaaagaaattatttacctgggagccaaaatagatgaaaatggtcatgaagaaggggagataaaggcaa

SEQ ID NO: 338 - DNA, 24 bp, Artificial Sequence
  primer
  misc_feature (1)..(24): forward primer
aatgaaaaacataataacggaagc

SEQ ID NO: 339 - DNA, 20 bp, Artificial Sequence
  primer
  misc_feature (1)..(20): reverse primer
ttgcctttatctccccttct

SEQ ID NO: 340 - DNA, 3813 bp, Diabrotica virgifera
  misc_feature (1)..(3813): WCRW transcript ta03247.005_diavv
cttagcgagatgcgtagagagcagaaagaatatagagatgaaataagagagctacgccaggagaatgtaacattaagagaagaaaacacgaaactaaaacaggcagtttatcaaatagaagaacggcttgaaagtttagaaaatcaaaaaaggcggaaaaatataattatacaaggattgaacatagatacaaatgggccagatatcctaaaacatgcaatgaaaaattttatgcagacagaattaaaagtagatgtacaaatagagaaggctctgaagttaggagaaaaagtttgtctggttgagcttgaaaaggaagaagataaaagaaaaatcatgcgaaacaaaaccaaattgagaaatcgagaagaaggtctagtttatatcaacgatgacctatcaaagaacgacagaattgtacagaaacatgtcagacaaaaagcgcaagaactaagaaaggaagggagaaaagtgaaagtagggtataagaaaatatatgccgatcatgaaatatggcgctgggatggaatgaaccaaacgttggtggtagagaccaaagcaaaaaactaagcaatagcaatgaaaggaaacaaatgacgacgaaaaatgcaaagaataggattacgaactatggaaatagaaacaaatcaagacagcaataaaaaagaaaagccgaaaaatgacaagatacagtttgcaacagggataaataagacggaaacgacgcaggcaatggacaaggcaataagtaaagataacaaaaagaaaactaaagtcaacttgggtacatggaatgtaagaggcacatacgaaacaggaaaactcaaagaattaattagagaaattaaaagatataatgtagaaataatagctttacaagagacaaaacaattggaaacagaaatagtagaaatagaagacgtggtattttttaaaagcgggggagaaaccagaaggttaggaacaggttttataatacagcgaaaatggaaggaaagagtaatggcattccaaccaatatcagatagattatgcacaataagattaaaaggggacaaacgaaacataagtataataaatgtacacgcaccgattgaagatgccacagaagaagaaaaagatgaattctacgagcaattggaaagagaatatgataaattaccagggtttgacatcaaaataataatgggagactgcaacgccaaagtcggaagagagaatatatacgaacacataatagggaaatatagtaagcatgaggtgtcgaacgataatggccaaagaataataggctttgcaacagaaaggcaaatggtgatacgaagcacacaattacgccgaaaagatatatataaaggaacgtggatttcccctgataagaagacagtaaatcagatagaccatattttaatagagaagaagcatgcaaacaatgtaataaatgtaaagagcatgagaggagcggactgtaactctgaccactacctggtgagagcagaatataaaatcgagcataacataaagcgaaacaataaaacaacagaaaaaattggaaaacaatttaacataggactactaaaagataacaacacacagaagaagtatgaacagggaataaccaacagactaatcagggaacaagaaacgtcaagcccagacaaacaatggcaaaatatcaaagaagcaatcttgaacacaagtaaagcaatcctagcgaaaaccaaaagaaaacacaaaacaaaagattggtatgatgaagaatgtcaagaagtagcagaagcaataagaaaggtaagactcaaaaatctcacaaatgacgaagaaagcactagagaagaatacagagaattgagaaaaatcatgaaaagaaaatgtagaagcaaaaagagaaaatacaacgagaacaaactgaaagaaatagaagaaaaatttcaaaaaaaagaaataagatcattctaccaggaagcaaaaaaaatggaaagaggatatcaaaaaaacaacccatatatgagagatgataaagggatgttgctaaatgagcctgaaaaaataatggaaaactggcaaaactatttcacagaactgctaaataagagcgaagtacaaaaggaaacaaaccatgaaattgaagatgatcagatagcaatagaaatacccacagaacaagaaataaagaacgaaataaagagcttgaaaaataacaaaagcccaggaataacagaaatatcggccgaaatgataaaatcaggagggaaaagactacagaaagagatatatgacctgataaaaagaatatgggaagtagaaaaaatgccagaagagtggaccatagcaagaatatgccctatacataaaaaaggtgatagaatgctatgcgaaaactacagaggcatcgcactattagaaatagtttacaaaatcttggcacaaagtataagtaaaaggctaagtcattattcggaaaaaatactgggggaataccaggcaggttttagaaacaacagatcaacgactgaccaaatatttgccttaaaagaaatacagactacctgttacgaacataaaacagtactatatgctttgttcatagactttaagcaggcttacgacacagtaaatagacagcagatgtacgaactgatgaaagaattggggataccaagtaaaattgtcaggatgataaagatgacgatggaaaacacaacaaacgaaatagcttggaaagggtatacatccaaaaagtttgaaaccaaggaaggattacgacaaggagacccactatcaacaatggcattcaatctaacattggaaggaataatcaggaaaagcagaataaacatgcaagaaacgatatttaaaaacggccaccaatgcatagcatttgcagatgatctgacgctattagcaacaagcaaaaaagaactacaaaagttaatgaaaaacataataacagaagccaaaaaattcggacttaaaataaatgaagaaaagacaaagtatatgataatgggagagatccaaaaagaaaaagagaataacatcatagtacaaatagatggagaaaaaacatactcgtttaaaagagccaaagaaattatttacctgggagccaaaatagatgaaaatggtcatgaagaaggggagataaaggcaagaatagctaaaggaaataaaaaatatggagcattacgcacattattgaaatccaaatacgtatcaagaaaaacaaaaataagaatttataagactgttatcagacctacagtaacatacgcatgcgaaacatgggtgctcaaaaagtcagaaacagaccttttagaaagatgggagagaaaaatgcaaagagcaatatatggaggtgtgaaaatagaaggtcagtggagaagaagaaccaataaagaattggaagaactatatcaagagccaacgattacgacgacgatcaaagcacagagaatacgatacttggggcacatcgagagaatgggaagtaaacgaatgccaaaaatggtactctcacgaagaccaatacaaaagaggaggaaaggcaggccaaggaaaagatggaaggacagtgtatatgaagacttgaagaaaagtaacattgagagatggaaagaactagcattggacagaaggagatggagagaggtggtgaaggagtgtataaaaaaactgaagtgtaattaaataaaatttataagttatgtaagttatattaagttataaacaatataacccaaggaataaaaaacctaaacagcttaacaaaaaaaaaacaaacactattgccctgaacaaaaaaagttttat

SEQ ID NO: 341 - DNA, 656 bp, Diabrotica virgifera
  misc_feature (1)..(656): RNAi target sequence
tgcaagtaatcatggcttcagagagatatagcttttctttaactactttcagcccctctggaaagttggttcagattgaatatgcattagccgctgtagcggcgggtgctccatcagtaggaattaaagcatcaaatggtgtggttattgcaacagagaacaagcacaaatcaattctgtatgatgaacacagtgtccataaagtagaaatgatcacaaaacacattggtatggtttattctggtatgggtcctgactatcgccttcttgtgagacaagcacgcaagatggctcagcagtattacctagtataccatgaacccattcctacagtacagttggtgcaaagagtagcgactgtaatgcaagaatacacccaatcaggaggagttagaccatttggagtgtcgctactgatttgtggttgggataacaacagaccttacttgttccaatgcgatccttctggagcttactttgcttggaaagctactgcaatgggaaagaattatgtcaatggaaaaacgttcttagaaaaaaggtacagtgaagagctagaactcgacgatgctgtgcacactgctatccttaccctgaaagaaagttttgaaggccagatgacagctgacaacatagaagttggtatttgcgatgct

SEQ ID NO: 342 - DNA, 22 bp, Artificial Sequence
  primer
  misc_feature (1)..(22): forward primer
tgcaagtaatcatggcttcaga

SEQ ID NO: 343 - DNA, 22 bp, Artificial Sequence
  primer
  misc_feature (1)..(22): reverse primer
agcatcgcaaataccaacttct

SEQ ID NO: 344 - DNA, 857 bp, Diabrotica virgifera
  misc_feature (1)..(857): WCRW transcript ta03948.001_diavv
ggtcaaacatcaaatccacaagtcatcaacacgaagaggaaagttgaaaattgtgtttgtaattgcaagtaatcatggcttcagagagatatagcttttctttaactactttcagcccctctggaaagttggttcagattgaatatgcattagccgctgtagcggcgggtgctccatcagtaggaattaaagcatcaaatggtgtggtcattgcaacagagaacaagcacaaatcaattctatatgatgaacacagtgtccataaagtagaaatgatcacaaaacacattggtatggtttattctggtatgggccctgactatcgccttctcgtgagacaggcacgcaagatggctcagcagtattacctagtataccatgaacccattcctacagtacagttggtgcaaagagtagcgactgtaatgcaagaatacacccaatcaggaggagttagaccatttggagtgtcactactgatttgtggttgggataacaacagaccttacttgttccaatgcgatccttctggagcttactttgcttggaaagctactgcaatgggaaagaattatgtcaatggaaaaacgttcttagaaaaaaggtacagtgaagagctagaactcgacgatgctgtgcacactgctatccttaccctgaaagaaagttttgaaggccagatgacagctgacaacatagaagttggtatttgcgatgctaatggattcagaaggtttgatccatctactgttaaggatttcttagctaatattccttaaatttttttatagtttcgattttttaatattacttggattattaaatttactataagtatcaaaaaaaaaaaaaaaaaa

SEQ ID NO: 345 - DNA, 512 bp, Diabrotica virgifera
  misc_feature (1)..(512): RNAi target sequence
acattcttaaacccggagacaaagtaggagcttccgaagccacattactcaacatgttaaacatttctcccttctcatatggtcttcaagttgagcaagtctatgactcaggcactgtatttgctccagctattttggacatcaaaccagaagatttgagggagaaattcttggctggagtagccaatttggctgctgtttgtttgtccattggacacccaacagttgcttctgctccacacagcattgccaatggattcaagaacttgttggctattgctgctgttactgatgttgacttcaaggaagccaagaccatcaaagaatacatcaaggatcccagcaaatttgctgctgctgctcctgtagctgcagccgccgctgcaccagctgccgagtctaagaaagaagagaagaaggaggaatctgaaagtgaagatgacgatatgggcttgggtctctttgactagaaagttttatatttttgatacgttatttgctgttttgtcgag

SEQ ID NO: 346 - DNA, 22 bp, Artificial Sequence
  primer
  misc_feature (1)..(22): forward primer
acattcttaaacccggagacaa

SEQ ID NO: 347 - DNA, 22 bp, Artificial Sequence
  primer
  misc_feature (1)..(22): reverse primer
ctcgacaaaacagcaaataacg

SEQ ID NO: 348 - DNA, 1042 bp, Diabrotica virgifera
  misc_feature (1)..(1042): WCRW transcript ta20424.001_diavv
  misc_feature (427)..(427): n can be any nucleotide
atacgagtccctaaccacttcaaagatgggtagggaggacaaggctacttggaagtcaaaatacttcaccaaacttatccaattgctagaagactacccaaagtgtttcattgtgggcgctgacaatgtcggctcaaaacaaatgcagcaaattcgtatttcattgcgaggaaatgctgtcgttcttatgggaaaaaataccatgatgcgtaaagctatcaagggccatattgaacacaaccctgctctggaaaagatcttgccccacatcaagggtaatgttggttttgttttcacccgaggtgacttggttgaaatcagagacaaactattggaaaacaaagtcaaagcccctgctagagctggtgccattgctccattatctgtcatcattcctgcccaaaacactggattgttccctgagaanacttctttcttccaggctttgagtagccccaccaagatttccaagggtactattgaaatcatcaatgatgtccacattcttaaacccggagacaaagtaggagcttccgaagccacattactcaacatgttaaacatttctcccttctcatatggtcttcaagttgagcaagtctatgactcaagcactgtatttgctccagctattttggacatcaaaccagaagatttgagggagaaattcttggctggagtagccaatttggctgctggttgtttgtccattggacacccaacagttgcttctgctccacacagcattgccaatggattcaagaacttggtggctattgctgctggtactgatgttgacttcaaggaagccaagaccatcaaagaatacatcaaggatcccagcaaatttgctgctgctgctcctgtagctgcagccgccgctgcaccagctgccgagtctaagaaagaagagaagaaggaggaatctgaaagtgaagatgacgatatgggcttgggtctctttgactagaaagttttatatttttgatacgttatttgctgttttgtcgagtcagactgtcaaataaatgaaacaggtcgc

SEQ ID NO: 349 - DNA, 700 bp, Diabrotica virgifera
  misc_feature (1)..(700): RNAi target sequence
  misc_feature (471)..(471): n can be any nucleotide
ggggagtacaatgtcggctaccagactggagaacggtgcgggtgattatattcaaacagaattgatatcgggcatcgatttcgttaataaaaacaattctaaaggacattgcgccaatggagaaactgggttaaatgaacacactaaatacaagaatggatttaaaaagtcggtcatttccaatggacatgtcacatcatcagacgaagaaacgacaaaaaataggacaaaaaatggttacaaaacagacacatcaacagacgaaccaaaaatccgacaaatcaaagaatccttcgaaccgcctacgttgatcaccaaagcactcacccacatcagtttctacatcctcatgttcttaggatacctcagccaggcgctgtttccacctaagttggtcaaagaaaaaaaatcgggaaggctatcgaccgttgtctgatcgttttgccgctttctattcccagtacgtctacnggcgtatcaaggattgttggaacttacccatttgcagcgtaccaggggatgaagtcgtacttaaagataggattacgagagatcattgctggacctttgaatttacggggtccaaaacgaaatgcataaatttggcttcctacaactacttggggttcgcagaagccacaggtccctgcgcagaacatgcgattcggacgatttacacggatggcattagtaccggaag

SEQ ID NO: 350 - DNA, 18 bp, Artificial Sequence
  primer
  misc_feature (1)..(18): forward primer
gagtacaatgtcggctac

SEQ ID NO: 351 - DNA, 21 bp, Artificial Sequence
  primer
  misc_feature (1)..(21): reverse primer
cttccggtactaatgccatcc

SEQ ID NO: 352 - DNA, 2113 bp, Diabrotica virgifera
  misc_feature (1)..(2113): WCRW transcript ta00669.001_diavv
ggggacagacaccagccgcagacctccaggcatgcgcttattcagcaaggtggtgtgactgctgtgagatggctgtgtcggctgtacgaaattacaggttagattaggtttgggttgggagttttctttgatttgttcgtgtgttgtgcctaaaaacttcagtacaatgtcggctaccagactggagaacggtgcgggtgattatattcaaacagaattgatatcgggcatcgatttcgttaataaaaacaattctaaaggacattgcgccaatggagaaactgggttaaatgaacacactaaatacaagaatggatttaaaaagtcggtcatttccaatggacatgtcacatcatcagacgaagaaacgacaaaaaataggacaaaaaatggttacaaaacagacacatcaacagacgaaccaaaaatccgacaaatcaaagaatccttcgaaccgcctacgttgatcaccaaagcactcacccacatcagtttctacatcctcatgttcttaggatacctcagccaggcgctgtttccacctaagttggtcaaagaaaaaaatcgggaaggctatcgaccgttgtctgatcgttttgccgctttctattcccagtacgtctacaggcgtatcaaggattgttggaacttacccatttgcagcgtaccaggggatgaagtcgtacttaaagataggattacgagagatcattgctggacctttgaatttacggggtccaaaacgaaatgcataaatttggcttcctacaactacttggggttcgcagaagccacaggtccctgcgcagaacatgcgattcggacgatttacacggatggcattagtaccggaagtaccagacaacagtacggaacgtgtgcactccatgacgaactggagcagctgatagccgaattcgtaggtgccgaagattccatcacctttggaatgggtttcgcgacgaactcactcaacattccaacactcgcatcgcctggttgtctgatattgagtgacgaaaagaatcatgccagcttgatattgggtatcaaacttaatcatcccaccgttagagtatttaaacacaataatgttaagcatctagaaaaactcctccaagaagccatctactacggccaacccggccaacccaacaacgagtacaaaccttggaagaaaatcattatttttatcgaaggcgtgtatagtatggaaggaaccataggccgccttccggaaattatagctcttaagaaaaagtacaaagcttatttatatttggacgaggcccacagcataggggccatgggcaagcacggcaaaggtgttgtagattatttcaactgtgatcccaaagatatcgacattttgatgggtacgtttacgaagagttttggaggcgcgggaggatacattgcaggttcaaaggaattcatatctttcattcgcgaacatagtcacgcgtctggtcacgcttgggcgatgtcgccgccagtcgcagcacagatcatatcagttctaaagataatcatgggcaaagatggtacaaacgaaggacaaaagagaatcgaaaggttagctaggaattccagatacgtcaggttgcgtctcgaacagatgggtttgatcgtacacggtaaccaagattctccagtagttcccattttagtttatcgttactcaaacgtagcggtagtggtaagaactttaattaaagaaaaaatagcaacagtaggcgtaggatatcctgcaacgccgcttgcggaatgcagaataagaatctgcatatcggcgggccacacgaaagagcagctggattatgccttatcagttatagaaaaagtagcagatgaaataggtattaagtattctagaaaaccgagagatccaaaaccgattgattacaataaaatcaaaatatatcaggatttgttttagagagagacttttagatgaagcttcaagagaacaccagcctgcgataggaggttttgttgtttttataaattttataaatgcatttaatatttgatttcaaaagctatttattaagaatcgtttttggctctgttttattttaatactttgcaaaataaaatataaaaacagaaa

SEQ ID NO: 353 - DNA, 440 bp, Diabrotica virgifera
  misc_feature (1)..(440): RNAi target sequence
gggtaatgaaagattccgttgtccagaagccctcttccaaccatcctttttgggaatggaagccaatggtatacatgagactacctacaattccatcatgaagtgtgatgttgatatccgtaaagacttatatgccaatactgtactctctggaggtaccaccatgtaccctggtattgctgacagaatgcagaaagaaataacctccttggcacccagcacaatgaaaatcaaaattattgctccaccagaaaggaaatactctgtttggattggtggttcaattttagcctctctttctactttccaacagatgtggatttccaaacaggaatatgatgaatctggaccatccattgttcacaggaagtgcttttaatttttatctatgtttaagtatattctttatatatcttgttttttatatcccccatcttggg

SEQ ID NO: 354 - DNA, 20 bp, Artificial Sequence
  primer
  misc_feature (1)..(20): forward primer
gtaatgaaagattccgttgt

SEQ ID NO: 355 - DNA, 21 bp, Artificial Sequence
  primer
  misc_feature (1)..(21): reverse primer
cccaagatgggggatataaaa

SEQ ID NO: 356 - DNA, 1465 bp, Diabrotica virgifera
  misc_feature (1)..(1465): WCRW transcript ta15851.001_diavv
ggagggcattccagtcttgtgatatttagtgcttacttggtacagcagtttcagtgctgtgctttagaataatttattttttaacatttatatagaaatcaaatactaaccaatcaacatgtgtgaagaagaagttgccgctttagtcgtagacaatggatccggtatgtgcaaagctggttttgctggggatgatgcacctcgtgctgtattcccttcaattgttggacgcccaagacatcagggtgtgatggtaggaatgggacaaaaagattcctatgtaggtgatgaagctcaaagtaaaagaggtatccttaccttaaaataccccatcgagcacggaatagtcacaaactgggatgatatggagaaaatttggcatcatacattctacaatgaactcagagtagccccagaagaacaccctgttctgttgacagaagctcctctcaaccccaaggccaacagggaaaagatgacacaaataatgtttgaaactttcaacaccccagccatgtatgttgccatccaggctgtactctccttgtatgcatctggtcgtactactggtatcgtattggattctggtgatggtgtatcccacactgtcccaatctatgaaggttatgcacttccccatgcaatccttcgtttggacttggctggcagagatttaactgattacctcatgaaaatcttgactgaacgtggctactctttcaccaccacagcagaaagagaaattgttagggatattaaagaaaaactctgctatgtagctttggacttcgaacaagaaatggcaacggctgctagttccagttcccttgaaaagagttacgaacttcctgatggacaagtcatcaccattggtaatgaaagattccgttgtccagaagccctcttccaaccatcctttttgggaatggaagccaatggtatacatgagactacctacaattccatcatgaagtgtgatgttgatatccgtaaagacttatatgccaatactgtactctctggaggtaccaccatgtaccctggtattgctgacagaatgcagaaagaaataacctccttggcacccagcacaatgaaaatcaaaattattgctccaccagaaaggaaatactctgtttggattggtggttcaattttagcttctctttctactttccaacagatgtggatttccaaacaggaatatgatgaatctggaccatccattgttcacaggaagtgcttttaatttttatctatgtttaagtatattctttatatatcttgttttttatatcccccatcttggggcaagaactgcctatgttatatgagtgatcttgtgatttattacacgttcagcataagacttaatgagctttaattttaagaagtgtaagttgaatactctgtttcatatttattttacctttgtaatataataaacaaaaaaaaaaaaaaaaaa

SEQ ID NO: 357 - DNA, 600 bp, Diabrotica virgifera
  misc_feature (1)..(600): RNAi target sequence
gttcgctagttccgtagtgtgttgtgcacatttaacatcgttctggcctgtagatactcctaataacttaaaaaatggcagatgacaaacaccccgtctatggacccttctttggagtcatgggagccgcggctgctatcattttcagttcgctgggcgccgcctatggtacggcaaaatcaggaaccggtattgccgctatgtcggtcatgaggccggaacttatcatgaaatgtattatcccagttgtcatggcgggtatcattgccatctacggtctggtcatagctgtactgatctctggtaacatccaagacagctctacatattcattgtacagtggttttgtccatttgggtgctggtctttcagtaggattttcaggattggcggcaggtttcgctattggtatcgtaggtgacgctggtgtaagaggtaccgcacaacagccaagactcttcgtaggaatgatcttgatcctcattttcgccgaagtattaggtctttatggtctcatcgtcgccatttacctctatactagagcttaagcgcccagctcccctaaattttcatctcctaaacacagcgtaccaaaagttg

SEQ ID NO: 358 - DNA, 23 bp, Artificial Sequence
  primer
  misc_feature (1)..(23): forward primer
gttcgctagttccgtagtgtgtt

SEQ ID NO: 359 - DNA, 22 bp, Artificial Sequence
  primer
  misc_feature (1)..(22): reverse primer
caacttttggtacgctgtgttt

SEQ ID NO: 360 - DNA, 2938 bp, Diabrotica virgifera
  misc_feature (1)..(2938): WCRW transcript ta15854.001_diavv
ggacctgaaattggcggatcgtcatatgggggattcttgcggggggcagtcgtgtaagccatgggggtcagtgggttcgctagttccgtagtgtgttgtgcacatttaacatcgttctggcctgtaaatactcctaataacttaaaaaatggcagatgacaaacaccccgtctatggacccttctttggagtcatgggagccgcggctgctatcattttcagttcgctgggcgccgcctatggtacggcaaaatcaggaaccggtattgccgctatgtcggtcatgaggccggaacttatcatgaaatgtattatcccagttgtcatggcgggtatcattgccatctacggtctggtcatagctgtactgatctctggtaacatccaagacagctctacatattcattgtacagtggttttgtccatttgggtgctggtctttcagtaggattttcaggattggcggcaggtttcgctattggtatcgtaggtgacgctggtgtaagaggtaccgcacaacagccaagactcttcgtaggaatgatcttgatcctcattttcgccgaagtattaggtctttatggtctcatcgtcgccatttacctctatactagagcttaagcgcccagctcccctaaattttcatctcctaaacacagcgtaccaaaagttgcgcatctcgccccgatcattttgtttttaatgtctacatgtaaaaataaaaactgtataaatggtagcaggcgatgaaagtgactgaggcgggcaatgtaaataatttagttatgatggggcccgtatttttcgcgtacggggcaaaacaaattaataattttagtaaaaaagactgggcctcttcatcgctgctgtgtccacacacacgactaataattccttatttccatattcatggaaccggtcgagttttcttgacaggtttttgtattaaaacgaattttcttcctaggcaaaataaaggtcttagttactaataggttgttcaaatgaaaatgtacgaaacgacactgtgggtataaatgaagtctttattcaaagtattcaccatttacctgagcacaacgatgccgttgattagccgaaggattcattgatcccagaactcctgtgaccatgaacagtcttccccgtatacatccggcgttgaatagcaactggtttaactaacaccttccgccgtcagaaacctgataacgcctcacgaattttgcaacatgaaccccatgatgtgcccacacgaactgtcgcgtcaattgaacggctctcttataagagcctctattctctcctgcgcatgcgggcgcccgggaatgccccgatcgaatccgaaggctacatttgcctccctggatgtctcactacgttatcccataacggcataggcaattatgtttgcggttaagttgttacgacgtttcgtgccttttcatttgatcagtcgcagtataatatacaagagaagagggaaaacaaattttgatttattttgcctcgtacgttacaatacctgtgctatcattgtaaataattttaaacatacttagaagcctctatttcattttcatggcgggtcaccactattattaaattaattgtatagttagtagaatttaggttaccgtttttcttttaatataaaagctagactctattgagcctaggaagtatttgaataaagttaaaaaagtagcacaatttatttttaatttcacaaaaatactgtacatttgttttatcattagtgtgttatacttgatatatcattttcatggccttacgaaggcttggtctctttatacaacaaatggttcgggaatgttatttttgacaatttttttgaatagcaagttttaagccagtaaaactgtggtattttttttcaatgcatcatcttttttaataaaaaaaactttggttaatggggcattacatcgcaaaaccgtaatttctaaataatatcgtcttaatttatttatctaacaatgtactgtctaaataacattcgtaaaccctgtacatttttttaatagtcaatttttatttgttcccatcctcatcagttttgcttacctttttttctctctcaaaaatatgatttcaaaataatctatgttccattaccttccaaaaataatataaaacggttttattatatcagcattgttgtaaatatgacaacttatgtgtatcgatggtttttttgatgtccatagctgtacgtgttagcctaaagtgtagtcatagctttggcaaaaaacatccccgttttcaacactgacgaaacttctatttaatagacagacggtgatgctttttgactttagcagataagaatgttatacagggttaacaaaaatgagaatactacgtctgatatatcctgtaacacacaaaatactttaaagctcagttacacgatgctaataacttgttttactggaatataaaacaccaatttacacaaggagagtactaaaagtcagtacatactcggttttagtgactcacaagtgttactagcatggtgtaactgagcctttatcctggcattccaattactggacaatgctatcatataaataccatgccatctaaataggtaatctacttgttagtcctaagagtttatcactatttaagtaaacgatgaattgaattggctgttttgtgttacaaggctagtaagttttctcttttcaagtcaaccctgtagtatctcctttttattttagtcatgaatcatcatctcagcacgaagcttgttgggcaagtgtctgccggttttcggtggattcggtccatcgaaataggcagacattgtgtcctattgttgtagagtattatattataatgtagattggttctgttgtaagaagggaacagcaaaattatgttgaaaataaataatttgtacattcc

SEQ ID NO: 361 - DNA, 525 bp, Diabrotica virgifera
  misc_feature (1)..(525): RNAi target sequence
gggatctccatcttcctttttcatttagtgtaaagcatgcctttccaaaggtttgtagaaaccggccgcgtggccgttgtatcggaaggcccacataagggcaaacttgttagtattgtagacgtaatcgaccagacaagggttttagttgatggccccaatagcaatgtacccagaggacagcttaggttaaatgaattgcatttaacaaagttccgcattaggtatccattttcagctccaactcgtgttgtaagaaaagcatggactgatgctaagattgatgaaaaatggaatgaatccgtctgggccaaaaaagtagcagccaaggaaaagagatcacaacttacagatcttgaccggttcaaacttcgtagggctcgttcacgaagaaaccacatccgtacagctactttcctttctttaaggaaggccgcatcaagaaacggtttcctctatggtaaaaagaagatggctaaaggaggtgacaaacctaaaccaagcaagaaggcgaagaaagaaaag

SEQ ID NO: 362 - DNA, 22 bp, Artificial Sequence
  primer
  misc_feature (1)..(22): forward primer
gggatctccatcttcctttttc

SEQ ID NO: 363 - DNA, 22 bp, Artificial Sequence
  primer
  misc_feature (1)..(22): reverse primer
cttttctttcttcgccttcttg

SEQ ID NO: 364 - DNA, 689 bp, Diabrotica virgifera
  misc_feature (1)..(689): WCRW transcript ta01695.001_diavv
aagaatacgaagagctactaacattacttaaataaactatagtttaagattttaatctgtcaacaactgtgatagccaggttcctttttcatttagtgtaaagcatgcctttccaaaggtttgtagaaaccggccgcgtggccgttgtatcggaaggcccacataagggcaaacttgttagtattgtagacgtaatcgaccaaacaagggttttggttgatggccccaacagcaatgtacccagaggacagcttaggttaaacgaattgcatttaacaaagttccgcattaggtatccattttcagctccaactcgtgttgtaagaaaagcatggactgatgctaagattgatgaaaaatggaatgaatctgtctgggccaaaaaagtagcagccaaggaaaagagatcacaactcacagatcttgaccggttcaaacttcgtagggctcgttcacgaagaaaccacatccgtacagcaactttccttgctttaaggaaggccgcatcaagaaacggtttcctctatggtaaaaagaagatggctaaaggaggtgacaaacctaaaccaagcaagaaggcgaagaaagaaaagcctgcatccaagaagaaataatttttagattaaatgacaatatatttgtttaaaaaacaaaaaaaaaaaaaaaaaatagaaaccatcattaactat

SEQ ID NO: 365 - DNA, 551 bp, Diabrotica virgifera
  misc_feature (1)..(551): RNAi target sequence
ggggatctttagtcagtgctttagaggccacgaagcaatttctaggatagacgaacgacgctcgcgacgacgcgctgcgacgcacacgacaaaaaaatacacaatacgacaccacgcgccattttgccattttctgtgtgtgcagtgaagtgaagtgctactaaaatcttcaaaattcaacccttctaagaaggccgatttcatgtgttctatatcgaagtaaaagagcaatagcatgggagtggcagaggatttcgctcccagcttcacgcaaaagcctcaattgaggcaggaggacgatggaaacaaactcattttcgaatgccagttactggctgctccgaaaccggaaatcgaatggtttcgaagcgatataccactttcagaagacagtagaactaattttaaaattcaatccataggcaccaacaaatttttagtagtactcgaattagatgatgttattgaaaccgacgctggcctttacaaggtcaaagcgaaaaataccatgggggaaatagcagcctccatcaatctcaactacagcccca

SEQ ID NO: 366 - DNA, 19 bp, Artificial Sequence
  primer
  misc_feature (1)..(19): forward primer
gatctttagtcagtgcttt

SEQ ID NO: 367 - DNA, 21 bp, Artificial Sequence
  primer
  misc_feature (1)..(21): reverse primer
tggggctgtagttgagattga

SEQ ID NO: 368 - DNA, 6974 bp, Diabrotica virgifera
  misc_feature (1)..(6974): WCRW transcript ta35139.001_diavv
acaatacgacaccacgcgccattttgccattttctgtgtgtgcagtgaagtgaagtgctactaaaatcttcaaaattcaacccttctaagaaggccgatttcatgtgttctatatcgaagtaaaagagcaatagcatgggagtggcagaggatttcgctcccagcttcacgcaaaagcctcaattgaggcaggaggacgatggaaacaaactcattttcgaatgccagttactggctgctccgaaaccggaaatcgaatggtttcgaagcgatataccactttcagaagacagtagaactaattttaaaattcaatccataggcaccaacaaatttttagtagtactcgaattagatgatgttattgaaaccgacgctggcctttacaaggtcaaagcgaaaaataccatgggggaaatagcagcctccatcaatctcaacttcagccccatggacgaaccaaaagaaaaacaaatagacggcctagcacccacttttgcgaagaaaccagctattcgccaagaagatgatggcaaaaaattattattcgaatgtaggatacaggccgatccccgtccaaccgtcagttggtcccacaatggcaacgctgttagcgaaggtccacgtcacaagttgaggatagataaagatggccattcatattttgcgacccttgaaataatcgatgtcacggtagaggatgctggcaaatacaaggtgaccgcaaaaaatgacttgggagaaagtaacgccacaatcagccttaactttgacagtggagatagcgctgatggctttgcgccttctttccttgagaaacccaaaatcatacctaatgagagtggcactcttattactatgaaatgtaaatgcaaagctaaacctaaacctgacgtcacgtggttccgcggaaccacagccgtcaaggaatcttccaaaattaaaatccagatcgttgatctcgaagaagacaaattcgaactgtccttagaaatcaaggatccatcggcagctgatgggggtacttacagatgccatgtgaagaacgaatacggagaaagtaatgcaaatctgaacctaaatatcgaagcagaaccagaaccagaaggagaaggaccaacgttcgtcgaaaaacccaggataacctctcacgatggaggcaaactcgttgtcatggagtgtaaagttcgtgctaatcctaaacctactatagtttggtacagagaaagcaaagaagtcacagaatcatccaaaattaagatcagtattaaacaaacagaagaagatatatattacgtcaaattggaactcaatgatccggggattgatgactctggcttgtacaaatgcaatataaggaacacacttggtgaactcaacgccaacctcaccttaaacatcgagattattcctgttatcaaagaaaaacccaaagttattaaaatcattaagaagaaaactgttattgttgaatgtaaagttctcagcaagtttgcacctgattgtacatggtttaaggaaagcgatgccgttaaagaagattcaagacatactgttcacgttgaccaagttaaagacggcgaatttactgttaaactcgaaattaatgaagttgagaaaaaagacaaaggtatgtacaaattggttgctaaaaacgaaaagggtgaggcaacttcacaagtcgttgaagtcactgagttacctccagaggagaaacccaaaggagacaagccgaaactgaccaaactaaccaatatcgttactgacgaaggaaaatcagttgattttataacttctctcaaaatcgaagacaaaacagtcaaaatcacatggtacaagaacaccactgtgataaccgaatcttcagaaatcaaaatctcttttgatggcactgtgacgcgacttagcattagtaaatgtaaagtatcacattccgctacatacaagtgcgttgccaaaaacgaatttggcgaagacgaaataagcgctacacttaaagtaaacgaagctaaagaggaagatgaagaagaagaagaatccgaagaggaggttatcgaagaaaagaaagaggaaaagaaagaagaaaagaaagaagaaaaacaggaaaagaaagttgaagagaaaaaagaagaaaaaaggtagaaaagaaagaagagaaggttgaaaagaaagtagaaaagaaagaggaaaagaaaacagaagaaaagaaagcagttaaaaagatagaaaagaaagaggaaagaaaagaagaggagaaaatgataattaagaaggacgaagaaaagaaaaaagacgaaaagattgtggccaaaaaggaagaggaaaagaaagatgttgagaagaaaataaggcgtacatcggttcaacagaacgaagaagtaagaaccgaatcacgcagaagctcaattatacaaaccgaagaaaaagttattaaagatggaaaagttagtaggaaatcttccatttcaaaagtcaatgaggagagtaagactgagtccaggcgcacatcattagtagatgacaagaaaaagataaccaaagataccaaaaaattggaaaccacaaaagaagtgtcagaagaaaagctgggagtagccgaagttaaaaagctggaaaaacctaaaagggtaataccccctaaagaagaagctcaaaagggttcgttcttgaacattcaattgaaaccagttcaatcggagggtaaaaaagctgaaaaggcgaataaacttgaagttgacttgaagaaaggagcagttgaagagaaaaagacaacagtcaaaaaatcttctgccaaaaaagaagattatgatattaatgcttgggaaaatatccctgattacgacagaccagtgttagagaaattcgaaaaacatgatgctccagaatatgctggtagagaaaagagtaaattctctaaggaaagaccatctatctcagtcgaaggaaaagaaaaagctccttctcagtcagctatatctgaacaacctagacctagccttcctcaaattaagactccagatgcacccaaaatcgaagtgagtagggaaaaaactcccgaacccagaaagaaatctctcgagcctggctcaggtccaggaagtcgtagaggatctcttattcctccagaagccatgggcagacgtgccagtcttatcatctccgatgagggaggaaaattacgtcctggggaagtgctagatccaaagcgtcgtcgtccgagctccgacgtacgtcgaccaagtttagctgaattggaggatctcgtgaacaaaccctcgactcctttgaaaccttccggtccaaagggagcagcacctcaaattgtcgatgtccaagaaaattactcctcagttgaagatcaaactgcttacattactatccaagttgagggtgatccaccaccgacattcaaattctataagggtatgactcaacttattgagggtggtagattcagatttgtaaccgatggtgaaacaaacttgatcacactctgcattagaaaggtaaagcccaatgatgagggtacctataaagttgtcatagccaacgtccatggtgaagactccgctgaaatgaccctcttcgtagctggtgctggaggtgttgatttccgttctatgctcatgaagagaaagtacgccaaatgggataaggataaggaagaccccaactggggagacttaaaagaggttgaaaaaccagtgccagcattaaaaaaagtcgaaaagaaacaagaaagtttccttaaaccattggtagatcagttcgctaaagaaggaaaagataagaaagttgtgttcgacgctggtttctcaaaaaccaactgtaaaccaaaatggctgttcaggaaagacgaacttttcccaggatctaaatacaaatttaagaatgaaggtgacgtgtaccagctgatcatcagcaatcctaaagtagaggatactggaaaatacacaattgaaatcggaggagtcagctctaccggtttcctgacagtagatgaaccagatccatgttacacctttaccaaagcactgaagaaaaaatatgatggatacaccaaacatgaagttgaactggcttgtactgtaagcagtagtttggccattgttggttggtataaaggagagacaaagttggaagataatgataaatttagtatctctaaagatattaacggagtctgtagactgactattaaagatgcgacatttgatgatgctggtgattacacctgcaaactagaaaaacaaaccgaaaagacacaaactaaagttaatattgtagactacccatataaattcgtgaaagtacttaagcatcaacaacttatagaaaaagaaaatgttacattagtatgtgagctcaacgatgctggtggtgatgtacagtggtttaagaacggagaagaaatcaaaccagataaacgagtagttatcagtaaagatggtcgcaaacgcaaactggtaattaaagacgccaaagttactgatgctggtatgtactcttgtactaccaatgcagacaaaaccgaagctgagcttattgtgaactacttgaaccgctttaacaaaaaactgaaagacactgttgctgttgaacgagaaaaactagttttggacattgaactacaagatcaaacagccccgtgcgagtggttgttcaatggcgaaccaatcaagccctctgagagagtcgagatcaaaaacttgggaggtggcaagcaccaactcatatttaatggtttagatatggcagatgacggtgaaattaagtgtgtatcaggaaaacttgaatcttccatgatgctttccgtcaaaaaaggtgaaagcaagcctgaaattgacttcccatcagacttcgctgcaccaattagcaaacctattgtccttgaagtaccatacaaaattagtggaaccagacagacacctttggaagctaaacttatcaaagacggaaaggtactacctctaaaagacgtagagacaataatttcagacgacaaagtcatattcaaaattaaaaaaccatccagagaccaatctggtccataccagatcaaattatcgaacgggcaaggtgaggatgttaaagatgtcaagatcaccatgcaggacgttcctgctccaccagaagacgttaatgtaacagatatattccaagacaactgtaaaatatcctggaaaccacccaaagataatggtggagcacctcttctccattatgttgttgaacgacaagatctcagtctcaaagctggttgggaaaatgttggtgaagtaaaagccaatgaaccaactacattcaaagttgaaaaactaattcccaagaaagaatataaattcagaatcagagctgttaaccagctaggtcctagcgaacctgctctattcggtaaaccagtattagctaaagatccttgggatgaagccagcaagcctaaagatgtagaagtagttgactgggatgttgaccacgcagacattacttggaagacacctgacagcgatggtggagctcctattactggctacgttattgaattttaaagaaaaattcgccaaagattggaaaaccggtgttgaagtaccaggtgaccaactgaaaggaactgttcctaaactcaaggaaaacagtcagtacgaatttagagtaagggctattaataaggctggaccaggagaacctagtgatcccaccaaacctatcatagctaagtgtagattcgtaaaaccatttattattggtaatgacttaaacagtattattatcaagaagggacaagttgtaaagtacgatattaagtacgggggtgaaccagaacccgaggtgcaatggttcctcgataaaaaagaaatcaaacccgacttggaagaaagagttactatcgacaaatatgacagaaacactattattacagtacgcagatgtacaagagctgacagtggaaaatatcgtttggtacttaccaacagctctggtacttgtgaaggggtggcggaagttattgttttagataaacctacaccacccaaagctatgaaagtcgaggaaatccgtgcagatcacgttaaagttgcatggcaaaaaccagaagatatgggtggtactgacctaactggttatatattagaaaaaatggatatggacacaggaagatggattcctgcaggtgaagttggtcctgatgaatcaaactttacgtttaagaacctgacacctaagaagaaatacaaatttagagttcgagctaaaaataaagaaggagaatctgaacctttggaaaccgatgactttattctagccaagaatccttacgatgagcccggagcacctggacaaccagaaatctttgactatgacaacaagagtgccagccttaaatgggctaaaccagatagcgatggtgggcgccctatcacccattacacagtcgaaatgaaagataagtttgcagctgattggactgaggtagccaagacgcctgacgctactcctgaagtggtcgtacctggtttaaaagaaaatatggtatatcaattccgtgtgaaagcacacaataaatcaggacctagtgtaccttccgcaccaacagctaaccacctctgcaaacacaaaaacttaaaaccaagaattgatcgtgaaacatttagagctgtcactataaaagctggccgtactcataagtgggcagttgactttatgggagagcctccaccatctgtcaaatgggtatggagagatgacattccattatcaaatagtgaacgtatcaagatagaaaactccgactaccatacggacttcacactcctcaacgctgttcgtaaagactcaggaaaatacacgcttactattgaaaacgttaacggaaaggatactgaaacagttgaactgactgtattgggcaaaccagcagcccctgaaggacctttagttgtatctgatgtgactgcagaaaaagctaaagttag

SEQ ID NO: 369 - DNA, 586 bp, Diabrotica virgifera
  misc_feature (1)..(586): RNAi target sequence
gggggagtagtcggtatgtatttgaatttatcttaatttgtttaatattagtagttaaatattaaactatagttagaagttgttatatatttgaccattagttgactccccaaaatgcagatcttcgttaaaaccttaacgggtaagaccatcacccttgaggtcgagccctcagatactatcgaaaatgtgaaagctaaaatccaggataaagaaggaattcccccagaccagcaacgtctcatcttcgctggaaaacaactcgaagatggtcgtaccttgtctgactataatattcagaaagaatcaacccttcacttggtgttgagattgagaggaggtgctaagaaacgtaagaagaagaattactccacccccaagaaaatcaagcacaagaagaagaaggttaagttagctgtattgaaattttataaggttgacgaaaatggtaaaatccaccgattgagacgtgaatgccccgctgaacaatgtggagctggtgtcttcatggcagccatggaagacaggcattactgtggcaagtgcggttacactcttgtcttctccaaaccaggagatgagaaat

SEQ ID NO: 370 - DNA, 19 bp, Artificial Sequence
  primer
  misc_feature (1)..(19): forward primer
gagtagtcggtatgtattt

SEQ ID NO: 371 - DNA, 22 bp, Artificial Sequence
  primer
  misc_feature (1)..(22): reverse primer
atttctcatctcctggtttgga

SEQ ID NO: 372 - DNA, 683 bp, Diabrotica virgifera
  misc_feature (1)..(683): WCRW transcript ta06472.004_diavv
ggagtagtcggtatgtatttgaatttatcttaatttgtttaatattagtagttaaataggaaactatagttagaagttgttatatatttgactattagttgactccccaaaatgcagatcttcgttaaaaccttaacgggtaagaccatcactcttgaggtcgagccctcagatactatcgaaaatgtgaaagctaaaatccaggataaagaaggaattcccccagaccagcaacgtctcatcttcgctggaaaacaactcgaagatggtcgtaccttgtctgactataatattcaaaaagaatcaacccttcacttggtgttgagattgagaggaggtgctaagaaacgtaagaagaagaattactccacccccaagaaaatcaagcacaagaagaagaaggttaagttagctgtattgaaattttataaggttgacgaaaatggtaaaatccaccgattgagacgtgaatgccccgctgaacaatgtggagctggtgtcttcatggcagccatggaagacaggcattactgtggcaagtgcggttacactcttgtcttctccaaaccaggagatgagaaatagatatatgtccttgtatattgtttaagaaaaaaatagaaaaacctttgtttatttgaataaaatattcgaggaaatatatctatttctcatctcctggt

SEQ ID NO: 373 - DNA, 611 bp, Diabrotica virgifera
  misc_feature (1)..(611): RNAi target sequence
ctccgaagacagacagtcgattttattcagtgattctgattgttcagtttttgtagttgtacagttttcgtattaggaaataaatcaaatatggcatcaggagtaactgtagcagatgcctgcaaaaaggtccatgaagaaatcaaaagggacaaaaaacacagatttgcaattttctacatcaaggatggcaaacagattgatgttgaacacataggagaaagaaatgcagagtatgatgatttcctaactaaactgcaagagggaggagctaatgaatgtcgttatggacttttcgattttgaatacatgcaccagtgccagggaacctcagagtcaaccaagaaacaaaagttattcctgatgtcgtggtgtcctgaaactgcatctgtcaaaaagaagatggtgtatgctagctcattcgaatatcttaaaaaagctttggtaatacagaaatctatccaagcgacagatttagcggaagcgagtataacagcggtagaagaaaaattacgatccactgatcgtcagtaacgccttttatttttattatttttctttttgtatctcgactgtctactcgcgcgccgacctgccgaggtgtattattt

SEQ ID NO: 374 - DNA, 21 bp, Artificial Sequence
  primer
  misc_feature (1)..(21): forward primer
ctccgaagacagacagtcgat

SEQ ID NO: 375 - DNA, 22 bp, Artificial Sequence
  primer
  misc_feature (1)..(22): reverse primer
aaataatacacctcggcaggtc

SEQ ID NO: 376 - DNA, 1099 bp, Diabrotica virgifera
  misc_feature (1)..(1099): WCRW transcript ta00957.001_diavv
gggaaatcgcgagaatacgggcgaggtttgaagtttttaattttttgttcatatcaccacttaaagctattgttatcattttagcatatataaaacaatagcttctgtgttggggattaacagtcgcggttgagctaaaaaatatatatttgttaatgttataaataatattcaaaaagtttgtttaattcaaaactggcgcatttcgtacgcatgaaaaaatagttcgaattgacattggaaacattttgatagttgtggtgacgtttgctgtaaatctatttaatttttggtgatttaataattgaaaatatttctgggaattaacgtagtttctagaaaaaatatcggtgacttattttggcgtagtaaaattgactcgcgcaggcgtacccccagctgccggtaggacaacgtccccaacagatctccgaagacagacagtcgattttattcagtgattctgattgttcagtttttgtagttgtacagttttcgtattaggaaataaatcaaatatggcatcaggagtaactgtagcagatgcctgcaaaaaggtccatgaagaaatcaaaagggacaaaaaacacagatttgcaattttctacatcaaggatggcaaacagattgatgttgaacacataggagaaagaaatgcagagtatgatgatttcctaactaaactgcaagagggaggtgctaatgaatgtcgttatggacttttcgattttgaatacatgcaccagtgccagggaacctcagagtcaaccaagaaacaaaagttattcctgatgtcgtggtgtcctgaaactgcatctgtcaaaaagaagatggtgtatgctagctcattcgaatatcttaaaaaagctttggtaatacagaaatctatccaagcgacagatttagcggaagcgagtataacagcggtagaagaaaaattacgatccactgatcgtcagtaacgccttttatttttattatttttctttttgtatctcgactgtctactcacgcaccgacctaccgaggtgtattatttatataagtatttgaatatttaataaagcttcatttataaaaaaaaaaaaaaaaaaaaaaa

SEQ ID NO: 377 - DNA, 357 bp, Diabrotica virgifera
  misc_feature (1)..(357): RNAi target sequence
aaaatgtccaagagaggacgtggtggttccgcgggagcgaagtttaggatctcccttgctcttcctgtaggagcagtaattaattgtgcagataatacaggagcaaagaacttatatgttatcgctgtacaaggtattggtggacgacttaaccgtctgccagctgcaggatctggtgacatgattgtagccacagtcaaaaagggtaaaccagaactcaggaaaaaagtcatgcctgcagtagtcatcaggcagcggaaaccatttagaaggaaggatggtgtcttcatttactttgaagataatgctggggttatagtcaataacaaaggtgaaatgaaaggatcagccatcact

SEQ ID NO: 378 - DNA, 22 bp, Artificial Sequence
  primer
  misc_feature (1)..(22): forward primer
aaaatgtccaagagaggacgtg

SEQ ID NO: 379 - DNA, 22 bp, Artificial Sequence
  primer
  misc_feature (1)..(22): reverse primer
agtgatggctgatcctttcatt

SEQ ID NO: 380 - DNA, 667 bp, Diabrotica virgifera
  misc_feature (1)..(667): WCRW transcript ta01259.001_diavv
aaggtattgtctctttaaggaatgcacagggatctaatgactggcaggctcgtttgcatctggttgcaaacgtcacgggggtctgggggctgtcaaaataagttctttcaataatacaaaatgtccaagagaggacgtggtggttccgcgggagcgaagtttaggatctcccttgctcttcctgtaggagcagtaattaattgtgcagataatacaggagcaaagaacttatatgttatcgctgtacaaggtattggtggacgacttaaccgtctgccagctgcaggatctggtgacatgattgtagccacagtcaaaaagggtaaaccagaactcaggaaaaaagtcatgcctgcagtagttatcaggcagcggaaaccatttagaaggaaggatggtgtcttcatttactttgaagataatgctggggttatagtcaataacaaaggtgaaatgaaaggatcagccatcactggtccagttgcaaaagaatgtgcagatttatggcccagaattgcatcaaatgcaagcagtattgcttgatgtgtatatgtttaagaaaaataaaataggatattgttcttaaaaaaaaaaaaaaaaaatgcgattttttatagaacctatgtaagtttacaatttattcatgaaataatgtaaaaatgacagg

SEQ ID NO: 381 - DNA, 520 bp, Diabrotica virgifera
  misc_feature (1)..(520): RNAi target sequence
ggcccaaacaactgtaagacagggtgctcaaggaggaactactgtataccccggtatgcaaaacacttacagagctactgcccgcccaccaaatcagtcaacaaccatgcgtagcaacatgagtgtacctaggcaaattactggacaacaaccacaaaatgcaattgtacctgctgctgttaacagaacagccaacttctaatacacttcaaacatgagaaatccaccacaacctttgggaggtttaccaggtgctgctgctccagtacagcaggctgtacacactcaaggtcaggaaccattgacagcaaccatgttggctgctgctccaccacaggagcaaaaacagatgttgggtgaaaggttgtttccacttatccaacgcatgtatccagacatggcaggtaaaatcactggtatgttattggagattgacaacactgagctgctacacatgttggaacaacaggagtcccttaagaacaaagtggaagaagcagttgctgttttacaagcccat

SEQ ID NO: 382 - DNA, 20 bp, Artificial Sequence
  primer
  misc_feature (1)..(20): forward primer
gcccaaacaactgtaagaca

SEQ ID NO: 383 - DNA, 22 bp, Artificial Sequence
  primer
  misc_feature (1)..(22): reverse primer
atgggcttgtaaaacagcaact

SEQ ID NO: 384 - DNA, 2656 bp, Diabrotica virgifera
  misc_feature (1)..(2656): WCRW transcript ta16449.001_diavv
cgcattttttttttttttttttgacttctgacaaatagactttttaaacctattgtgaagaaaaactattaaaaaaacaaaaaaaattgtaaaatagtgtaaaaaagtaaaaaaatatccaacgaagatgaatccggctgccccaaattatcctatggcgtctttatacgtcggcgatttacattctgatattactgaggccatgctttttgagaaattttcaaccgcgggtcctgtgctttcgattcgcgtgtgtagagacttgattacacgtcgatccttgggttatgcatatgtgaacttccaacaacctgcagatgctgagcgtgctttggataccatgaattttgacttgataaaaggtaggcctatccgcatcatgtggtctcaacgtgatccatcattgagaaaatctggcgttggaaatgtttttatcaagaatttagatcgttccattgacaacaaggccatgtacgatactttctcagcttttggtaacattcttagttgtaaggtagcccaagatgaaaacagctctagtaaaggttatgggtttgtccattttgaaaccgaagaagctgcaaataagtctattgaaaaggtaaatggtatgttgttgaacggaaaaaaagtatatgtaggccgctttattccacacaaagaaagagaaaaggaactgggagaaaaagccaagctgttcacaaatgtttatgttaaaaattttggtgaagattttgctgaggaacagttaaaggttatgtttgaaaagtatggtaaaattaccagctacaagataatgagtaaagaagatggtaaatcaaaaggatttggttttgtagcctttgaaagttcagaggcagcagaagcggcagttgaagctttaaatggaaaagagttggttgaaggaaaacctttgtatgttggaagagcccaaaagagagctgagcgtcaacaagaactaaaacgtcgctttgaagccttaaaaatggaaagacttaatcgctatcagggtgtaaatctctatgttaaaaatctagatgatacaatagatgatgaacgtctccgtaaagagtttactccttttggaaccataacatctgccaaagtgatgttggaagaaggtagaagcaagggttttggttttgtatgtttttcctctccagaagaagctacaaaggcggtaacagaaatgaatggcagaattgttggttctaagcctttatatgttgccttagctcagcgtaaagaagatcgtaaagcacatttaacttctcagtacatgcagcgtatggcaaatatgagaatgcaccagatgggtcagttcatacaaccaggtgcatctagcggttattttgttcctaccattcctgccgcacaaagattctatggaccagcacagatgactcaaattcgtgctagtaccagatgggccgcccaaacaactgtaagacagggtgctcaaggaggaactactgtataccccggtatgcaaaacacttacagagctactgcccgcccaccaaatcagtcaacaaccatgcgtagcaacatgagtgtacctaggcaaattactggacaacaaccacaaaatgcaattgtacctgctgctgttaacagaacagccaacttcaaatacacttcaaacatgagaaatccaccacaacctttgggaggtttaccaggtgctgctgctccagtacagcaggctgtacacattcaaggtcaggaaccattgacagcaaccatgttggctgctgctccaccacaggagcaaaaacagatgttgggtgaaagattgtttccacttatccaacgcatgtatccagacatggcaggtaaaatcactggtatgttattggagattgacaacactgagctgctacacatgttggaacaacaggagtcccttaagaacaaagtggaagaagcagttgctgttttacaagcccatcaagccaagcaagctgctactactcagattaagaaagagtagttgctgaagcagtgatgattttatgttttatatttttaagcataaataaaaagtacttgtgcattttcaaaaaaaaaaaaaaaaaatgcgtcaaattagctgattgtagcttaaacataatctttaaatctaatgtgtttattattacagtttttgtttagcatcaaacattgcttacatctccatattcacttcttgattattgtttaatagtttgtcatttgatttaaattatacaacaaagttaatgctttgtcatttattcagtttttgtattataaaaaaatatacaattctggaccttggaggtaaactacattatgttaacatggtgttgttttgaataagttcccttaatccacttattttattagttggattatacaaatttggttatatattattcaaatatggttacattgtttttcaaacaattgagatttttataacactcaaagtgctctactgtaatttacctccgaggtccagatatgtttttggaaatcgtcaaagtctcagtacggctagctttgctacatttgtaacacatgattaatttcatttagaatagttgattacaaaaatgccacaaggaaatagcttcagaacatttcattttttaattattataaattcattttagaaagcattatcaaattgtag

SEQ ID NO: 385 - DNA, 490 bp, Diabrotica virgifera
  misc_feature (1)..(490): RNAi target sequence
tcaggtatgccagtttattttggaagattatgtaatgtctgggcaaggagcctgggccaacatctgcgtcacacaacccagacgtatatcagccgtttcggtatcagaaagagtggctgccgaacgatgtgaagagctcggtcagtctatcggttactcagtgcgttttgaatcagctttacctaaaccgtacggatcagtaatgttctgtacagtaggagtgttgttgaaaaagttggaaaatggtcttagaggagtcagccacgttattgtagatgagattcacgaacgagatgtcaatagtgactttattatggttgttttgagagatatgatccacacatatcccgatttaagagtaattcttatgtctgctaccatcgatacaactttattctctaaatatttcaacaactgccccgttatcgaaattccaggaagagcttttcctgttaaacagtatttcttggaagatgctattgaactcacg

SEQ ID NO: 386 - DNA, 23 bp, Artificial Sequence
  primer
  misc_feature (1)..(23): forward primer
tcaggtatgccagtttattttgg

SEQ ID NO: 387 - DNA, 22 bp, Artificial Sequence
  primer
  misc_feature (1)..(22): reverse primer
cgtgagttcaatagcatcttcc

SEQ ID NO: 388 - DNA, 4007 bp, Diabrotica virgifera
  misc_feature (1)..(4007): WCRW transcript ta01430.001_diavv
gggggccacaagcacaagctaaagcgacacgccgggatttggttccggtagaaaaattcagaaaaaatctattttttcgtttaaacaagcataaaaaataattaccaaatattaataaaacatttacaatcgtggtaaacgtattttgaattcatcatgtctgatctaaaatcctttctaaaccaatggtgtcagaagaataaaaaggaaccagcttatgaagtgagacccacgggacccaagcataggcagagatttctctgtgaactaagaattgatggctacaactatgttggagcaggaaattcaaccaacaaaaaggatgcacaatctaatgcttcaaaggatttcatctctttcttggttcggcaaggaatgattaacaaaaatgaggtaccagctgatattgatgctgctcctacacctgccattcaccacggccaacaagaaatgacaggtggcgggccgcaacatcaagtgtttgagaaaggtatgggtcctgccaattttggtgaagcataccgtcctcgtggtcgagaagatggagaatggcattatatggacagagctcaagaacagaaacgaatggaagaagcagaagatttagatgtgaatgctcaaattcatggaaattggactgtagagaatgccaaatctaagctacatcaattcatgcaagccaataagattaacacggattataaatatacacaagttgggccagatcactctagaacattcgtcgcagaactcagtttctatgttaaacaacttggaagaactattcatggaagggatactggatctaataaacagactgcaagtaaaagttgtgccctatcagttgtgcgacaactttttcacttgaaagtcattgaagctttttcaggaacattaaaaaaagaaaagaagtcagcaacagaaatgcctcctttccaagtaagactaagtcctaaattgaaggatcaaatttctgactgtttgaggtcattaaacgtgactcccactccagtcacctctaatcaagtggacgataaaggcgaacctgtacccgtgtctctactaagcagccacgttttagacgactttcatcccgcaaaacccacagcggctggtgtggttccgtggtcgccacctcaaccaaactggaactgctggacaggttgtaatatagacgaagggtatttagctagtgctacgttggatgatttaagtgaacagatgcttactgattggaaacacagaacagcgaatgattcttcgctgatcactagtatgcaagacagaatgattttgccggtatatacgaagaaatcagagattatggaagctatcaacgaacatcctgttattatcataaggggaaatactggttgcggtaaaacaactcaggtatgccagtttattttggaagattatgtaatgtctgggcaaggagcctgggccaacatctgcgtcacacaacccagacgtatatcagccgtttcggtatcagaaagagtggctgccgaacgatgtgaagagctcggtcagtctatcggttactcagtgcgttttgaatcagctttacctaaaccgtacggatcagtaatgttctgtacagtaggagtgttgttgaaaaagttggaaaatggtcttagaggagtcagccacgttattgtagatgagattcacgaacgagatgtcaatagtgactttattatggttgttttgagagatatgatccacacatatcccgatttgagagtaattcttatgtctgctaccatcgatacaactttattctctaaatatttcaacaactgccccgttatcgaaattccaggaagagcttttcctgttaaacagtatttcttggaagatgctattgaactcacgaagttcgtgccacccactgataccagaaaaagaaaaaataaaggtggtaaagatgatgacgaagaagaaagtacaggcgttgaagaacctgacgaaaatttaaacaaggttgtaggaggaaattattcagatctgaccagaaacgtcatgtctagactgaatgaaaaagaagtgagttttgagcttctggaagctcttttagactacatcaaaacacaatctatacctggagctgtattagttttccttcctggctggaatttaatcttcgctatgatgaaacatcttcaaaatcaccccgtttatggaggaagtcagtacagtattttacccttacattcccaaatccctagagaagatcagaaaagggtctttcaacctgttcctgaccacgtaacaaaagtcattcttgcaacaaatatcgccgaaacttccatcaccataaacgacgtagtgtttgtgattgacagttgcaaagcaaaaatgaagatgtttacttctcacaacaatatgactagttatgctacggtttgggcttccaggacaaacttggaacagagaaaaggtcgagctggtcgtgttaggccaggtatttgtttccatttgtgttccaaggccagattcgacaaacttgacgaacatatgacaccagagatgtttagaactcccttacacgagctggctttgagcataaagctgttacgtttgggctcgataggtcatttcctgtcaaaggctattgaacctccaccattagatgccgtcatcgaagcggaagtgctattaagagaaatgaaatgtctggatcaaaacgatgagttgactcctctgggtagaatcatcgccaagcttcccattgaaccgagattggggaaaatgatggttttgggttgtgtatttatgtgtggaggaccattggctacgatggctgcaaactcttctacattccctgaaatattcacgctagacatgggccaaagacggttaagctatcatcaaagagccttatctggggacaggcactccgatcatgttgcgatgttaacagcatttgagctgtgggatcaagccagacaaggtggagaagaagcagaattaaggttttgcgatttcaaaggcatcagtatgccgactatgagagtaacttgggaagctaaacatcaactacaacaaatcttgaataatgtaggttttccagaagaaactatggcgctatttcctatggaaactgttggtccagatcccagacttgatgttgtaatgtctcttatgtgttacggattatatccaaacgtttgtttccacaaggacaaaagaaaggtattaacaacagaaagcaaagccgcacttatccacaaaacttccgtcaactgcagtaaccaggatcaaggatttccatacccattctttgtatttggagaaaaaatcagaaccagagctgtatcttgcaaacagatgactatggttacaccccttcatcttctgctgttcggttcccgaaaagtagaatgggttgataacgtggttaggttggacaactggatcaatttggacatggatcccgaggtagcttccatgatagtggctctaagacctgcgttggaaagtttagttattagaacttctcagtctccagaagcaatcttggaaatgggagaaactgacgttaaggttgtgtcaacgattaaagaaatatgcagattgcacgcaggaagttttgaactagaaagagccaaaggtagcctgcttcaatcaaataggcctcccagaggacacactctcggagggttcagtggaccttctcccaaattcttcagaggtggctttaatagtcgaggtggtggtggaggtttcagaggtggattccgtggcgatagaaatgggggcggttttggcggcggcagaggtggattccgaggtggtcgaggcggatttggaggaggcggtggtggctttggcggttcccgtggtggaagatattagatatcttataatatatatagatataacttaattactaatgtttcttaggtatttattgcattttaaaaatgactgtttccaaacaatgttttgcaatgtattagtatgacagtgtatcagttaatttaagatttagtgtttaattt

SEQ ID NO: 389 - DNA, 658 bp, Diabrotica virgifera
  misc_feature (1)..(658): RNAi target sequence
gggggacttcattccagtcttgtgatatttagtgcttacttggtacagcagtttcagtgctgtgctttagaataatttattttttaacatttatatagaaatcaaatactaaccaatcaacatgtgtgaagaagaagttgccgctttagtcgtagacaatggatccggtatgtgcaaagctggttttgctggggatgatgcacctcgtgctgtattcccttcaattgttggacgcccaagacatcagggtgtgatggtaggaatgggacaaaaagattcctatgtaggtgatgaagctcaaagtaaaagaggtatccttaccttaaaataccccatcgagcacggaatagtcacaaactgggatgatatggagaaaatttggcatcatacattctacaatgaactcagagcagccccagaagaacaccctgttctgttgacagaagctcctctcaaccccaaggccaacagggaaaagatgacacaaataatgtttgaaactttcaacaccccagccatgtatgttgccatccaggctgtactctccttgtatgcatctggtcgtacaactggtattgtgttggattctggtgatggtgtatcccacactgtcccaatctatgaaggttatgctcttcctcatgcaatccttcgtttg

SEQ ID NO: 390 - DNA, 22 bp, Artificial Sequence
  primer
  misc_feature (1)..(22): forward primer
cttggtacagcagtttcagtgc

SEQ ID NO: 391 - DNA, 22 bp, Artificial Sequence
  primer
  misc_feature (1)..(22): reverse primer
gcatgaggaagagcataacctt

SEQ ID NO: 392 - DNA, 1534 bp, Diabrotica virgifera
  misc_feature (1)..(1534): WCRW transcript ta02481.002_diavv
ggattccagtcttgtgatatttagtgcttacttggtacagcagtttcagtgctgtgctttagaataatttattttttaacatttatatagaaatcaaatactaaccaatcaacatgtgtgaagaagaagttgccgctttagtcgtagacaatggatccggtatgtgcaaagctggttttgctggggatgatgcacctcgtgctgtattcccttcaattgttggacgcccaagacatcagggtgtgatggtaggaatgggacaaaaagattcctatgtaggtgatgaagctcaaagtaaaagaggtatccttaccttaaaataccccatcgagcacggaatagtcacaaactgggatgatatggagaaaatttggcatcatacattctacaatgaactcagagtagccccagaagaacaccctgttctgttgacagaagctcctctcaaccccaaggccaacagggaaaagatgacacaaataatgtttgaaactttcaacaccccagccatgtatgttgccatccaggctgtactctccttgtatgcatctggtcgtacaactggtattgtgttggattctggtgatggtgtatcccacactgtcccaatctatgaaggttatgctcttcctcatgcaatccttcgtttggacttagctggtagagacttgactgattacctcatgaaaattttgactgaacgtggctactctttcaccaccacagcagaaagagaaattgttagagatattaaagaaaaactctgctatgtagctttggacttcgaacaagaaatggcaacagctgctagttccagttcccttgaaaagagttatgaacttcctgatggacaagtcatcaccattggtaatgaaagattccgttgcccagaagctctcttccaaccatccttcttgggtatggaagctgctggtattcatgaaacaacctacaattccatcatgaagtgtgatgttgatatccgtaaggacctatatgccaacactgtactctctggaggtaccaccatgtaccctggtattgctgatagaatgcagaaagaaatcactgccttggctcctagcacaatgaagattaagatcatcgccccaccagaaagaaaatactctgtatggatcggtggttccattttggcctctctatccaccttccaacaaatgtggatttccaaacaagaatatgatgaatctggtccatccatcgtccacagaaaatgcttctaatttgtttttgtccgcatttatattctttatttctatttacataagcccgcccattttccgggcgcgaactgccgtgtttatcgtatgggatcgagaccataaaatatccacactaggccaaagtattactatcttaatttttgtaatttattacctgtgcaaagtaagactattatattattaggctaatactatgggaaaataaaaaaaatagtaaaactcaaaaaaaaaaaaaaaaaatcagtttacctttctaataaaataaataaaacaaaaaaaaaaaaaaaaaa

SEQ ID NO: 393 - DNA, 601 bp, Diabrotica virgifera
  misc_feature (1)..(601): RNAi target sequence
tgctccaagatgaaggtactcattcttctttccgttgttgccttgagcagctgcttaccagcatccagaaatcaacaatacgttgatgcagactacaacagctacaacgctcatcccgtctacaacttctggaggacttggaatcagcaacactatggacaagaaccatggaaccaatgggtacaatatggtgtccagaaccaacccggtaactactggaggcagtacgtgcaacgcagcaaccaagctgaaaatgtcgatttaccttggatgtatcactcttgggatgtccaggatgtgcaaaacttaactcccgttcaacgtgttcagttgctactcaactacgtcagacttcaccaacaatggaaccaatggactcatgatgtaactgccaatgaacgtcttcagaatatgttgtatcaacaccttcctgaacacttatggagctccaacgagcaaattgtaccatacatgatgaactacttcaaccaatacccaatgaaatacaacgacattatgcatgaagttatgcaaaccccatgggctcaccaacaacttatgttccacgttatgtctgaattataccagcacttcggtcaag

SEQ ID NO: 394 - DNA, 22 bp, Artificial Sequence
  primer
  misc_feature (1)..(22): forward primer
tgctccaagatgaaggtactca

SEQ ID NO: 395 - DNA, 22 bp, Artificial Sequence
  primer
  misc_feature (1)..(22): reverse primer
cttgaccgaagtgctggtataa

SEQ ID NO: 396 - DNA, 1208 bp, Diabrotica virgifera
  misc_feature (1)..(1208): WCRW transcript ta08003.008_diavv
ggggggacatttcagtacactgctccaagatgaaggtactcattcttctttccgttgttgccttgagcagctgcttaccagcatccagaaatcaacaatacgttgatgtagactacaacagctacaacgctcatcccgtctacaacttctggaggacttggaatcagcaacactatggacaagaaccatggaaccaatgggtacaatatggtgtccagaaccaacccggtaactactggaggcagtacgtgcaacgcagcaaccaagctgaaaatgtcgatttaccttggatgtatcactcttgggatgtccaggatgtgcaaaacttaactcccgttcaacgtgttcagttgctactcaactacgtcagacttcaccaacaatggaaccaatggactcatgatgtaactgccaatgaacgtcttcagaatatgttgtatcaacaccttcctgaacacttatggagctccaacgagcaaattgtaccatacatgatgaactacttcaaccaatacccaatgaaatacaacgacattatgcatgaagttatgcaaaccccatgggctcaccaacaacttatgttccacgttatgtctgaattataccagcacttcggtcaagccccatggtcccacgaacaaataatgaaccagatcatgcaacaccaatacctctacggtacaaccttatcccaacaacaactccaacaattggtagaattcgtactccacattcaatacgaacttactcctttacattaccaacaacttgaacaagttcaaccctggaaccgtgaacaagtactttcatggaaccaaggacaagtactcccatgggcctacagacaacttcttccattgaactatgaaaccgttttaccatggacccgccagtattccgcacaaaacaacatgaacctagagtcccaatacaactacaatctccaccaacaacaaatgccattgtcccaatactggaaccagagatacggacaacaatacccacaacattatgaagccatggaacaacccggatggtggaaccaagaatggacccaaaacttggttggacaagagaatcattatcctctcttggggcaaaatatgcccttagtatattaaaaagtattctgttctaagcatatgatttaaaataaaaaaaggcatatatacttgttagttttatttttaacccgtatacaaagagtt

SEQ ID NO: 397 - DNA, 600 bp, Diabrotica virgifera
  misc_feature (1)..(600): RNAi target sequence
atttctttcaaactgggattcggtgaagacgtgacagctcagggggcgtttaatgaaaaaactgtgatttattagtgaaatagtggttaaaacccagcaaaatggggattaaatttttggaagttataaagcctttctgcagcatactgcctgaaatagccaagccagaaagaaaaatccaattcagggagaaagtactatggactgcaatcactcttttcatctttttagtatgttgtcagattccattattcggtataatgagttcagattctgcagatcctttctactggattcgtgttattcttgcatcaaacagaggtacccttatggaacttggtatttccccaattgtaacttcaggtctgattatgcagctgttggccggtgccaaaattatcgaggttggtgacactccaaagacagagccttattcaatggtgcccaaaaattgtttggtatggttattactgtcggtcaagccatcgtgtatgtaatgacaggcatgtatggtgatccggctgaaattggagctggagtgtgccttctcatcatcatccaactgttcgtcgccggtctcattgtattgcttctcgatga

SEQ ID NO: 398 - DNA, 22 bp, Artificial Sequence
  primer
  misc_feature (1)..(22): forward primer
atttctttcaaactgggattcg

SEQ ID NO: 399 - DNA, 22 bp, Artificial Sequence
  primer
  misc_feature (1)..(22): reverse primer
tcatcgagaagcaatacaatga

SEQ ID NO: 400 - DNA, 2110 bp, Diabrotica virgifera
  misc_feature (1)..(2110): WCRW transcript ta03313.003_diavv
ccaacatcatcgatcacgtgacccgtgtgctgtgctacgtgtacgacgtgtagacgtaaaacagagacaagaagtaccgtaatttctttcaaactgggattcggtgaagacgtgacagctcaggggggcgtttaatgaaaaaactgtgatttattagtgaaatagtggttaaaacccagcaaaatggggattaaatttttggaagttataaagcctttctgcagcatactgcctgaaatagccaagccagaaagaaaaatccaattcagggagaaagtactatggactgcaatcactcttttcatctttttagtatgttgtcagattccattattcggtataatgagttcagattctgcagatcctttctactggattcgtgttattcttgcatcaaacagaggtacccttatggaacttggtatttccccaattgtaacttcaggtctgattatgcagctgttggccggtgccaaaattatcgaggttggtgacactccaaagacagagccttattcaatggtgcccaaaaattgtttggtatggttattactgtcggtcaagccatcgtgtatgtaatgacaggcatgtatggtgatccggctgaaattggagctggagtgtgccttctcatcatcatccaactgttcgtcgccggtctcattgtattgcttctcgatgaacttctccagaaaggatatggtttaggttctggtatttccctcttcattgcaacaaacatttgtgaaactattatttggaaagccttctcaccagcaacagtaaacactggaagaggaacagaatttgaaggagctgtcattgccttattccacttgttgaccaccagacaagacaaaatcagaggattacgtgaagctttctacaggcaaaatcttcccaatttgatgaacttgttggcgacagtactcgtttttgctatagtaatatacttccaaggattcagagtagatctacccatcaagagtgcaagataccgtggacaatattccagctatccaatcaaattgttctacacttcgaacatccctattattctacaatctgctcttgtatctaacttgtatgtcatctcacagatgttggctgttaaattccaagggaacttcttaattaatctattaggagtctgggctgacgttggaggcggtggcccagctaggtcttaccccattggaggattatgttactacttatctccacctgaaagtgtaagtcacattctagaagatccaatccacgcaatgctctacatcgtcttcatgttgggatcttgtgctttcttctccaaaacatggatcgaagtatctggaagctcagccaaagatgtcgctaagcaattgaaagaacaacagatggtaatgagaggacacagagataactccatgattcacgaattgaacaggtacattcccaccgccgcagcttttggaggtctctgtattggagccttgtcagtactcgctgatttcatgggagccattggttcaggtactggtatcttgttagctgtcaccatcatctaccaatacttcgaaatcttcgtcaaagaacaaagcgagatgggtggaatgggagcgttactcttctagataaattgaagatatcacaaagctatagcttgactgatattgtgattttgtttggtaaatagtaactattgtggttattatttgtttagtttttgtacctcagtgtctccactatagttattatttatgtggaacaacttatatgtcactttgtataaagtgtgaaacatttttttgtactaaaagattgaaaatagacaaatatatttcattgtacatttacatgattttgtgtttaagaagcgagttatttataatgtgcggatgtcccatactattagtttattttttacattttttcattctcgttcatgcagtacggttgtgtattgatcatttattatttgttgttagatataatttattttaaatacagaaatttctgaaatcctgtttttcatttgatgctaatgtatactgtaaatgtttcgagataagggcatctatcatttaaatgttgaaatattattgaaatgtacaaatttacatgttctttt

SEQ ID NO: 401 - DNA, 707 bp, Diabrotica virgifera
  misc_feature (1)..(707): RNAi target sequence
gggggaccttttatatttgacatcctgaaagatggttgagaaaaaggctgtacagaagcccgctggggatgcaccaaaaaaggtgcacaaaccaggaaaacctagaaattatgatttgggaaatggagtactcagattttctagatctaaaatgttccacaaaaaagcattgtacaaatttgttggcaagaaggtagaagctaccaagaaacctcaaaagccccaggttattgaaaaaccaattggtggagagaaaaatggaggaaagagatttgttttggtcaagaaacgtagggcatcctatccaacccaagacaaaattaaggccaggccagctaggagaacatttagccaacacacaaggtctattagaaatacaatcactccaggaacagttctcatccttttagctggttctcacaaaggaaagagggttgtattccttaaacaactgtactctggtctacttttggtaactggaccttttggaatcaatgcttgcccattgaggcgcattagccaacgatatgtaattgctacatctaccaaaattgacgttagtggagtacagctgccagaaaaccttaatgatgaatattttgcaagaaagaggcagaagagatccaagaaagaagaaggtgatattttccaatccaaaaaagaaggttacaaagtaagtgaagataggaaagctgaccaaaagaaag

SEQ ID NO: 402 - DNA, 18 bp, Artificial Sequence
  primer
  misc_feature (1)..(18): forward primer
gaccttttatatttgaca

SEQ ID NO: 403 - DNA, 22 bp, Artificial Sequence
  primer
  misc_feature (1)..(22): reverse primer
ctttcttttggtcagctttcct

SEQ ID NO: 404 - DNA, 1036 bp, Diabrotica virgifera
  misc_feature (1)..(1036): WCRW transcript ta17558.001_diavv
aaggagagggaggttttcctgtttgtgcaccttttttgtgcagacagaacgaccacctggacacgcatgctatgggggaccttttatatttgacatcctgaaagatggttgagaaaaaggctgtacagaagcccgctggggatgcaccaaaaaaggtgcacaaaccaggaaaacctagaaactatgatttgggaaatggagtactcagattctctaggtctaaaatgttccacaaaaaagcattatacaaattcgttggcaagaaagtagaagctaccaagaaacctcaaaagccccaggttattgaaaaaccaattggtggagagaaaaatggaggaaagagatttgttttggtcaagaaacgtagagcatcctatcctacccaagacaaaattaaggccaggccagctaggagaacatttagccaacacacgaggtctattagaaatacaatcactccaggaacagttctcatccttttagctggttctcacaaaggaaagagggttgtattccttaaacaactgtactctggtctacttttggtaactggaccttttggaattaatgcctgtccattgagacgtattagccaacgttatgtaattgctacatctaccaaaattgacgttagtggagtacagctgccagaaaacctaaatgatgaatattttgcaagaaagaggcagaagagatcaaagaaagaagaaggtgatattttccaatccaaaaaagaaggttacaaagtaagcgaagataggaaagctgaccaaaagaaagtagatacacaagttctggctgcaatcaagaagcaatcagaccgcaaagtacttttagcttatttgtcagccatgtggggactcagatcatcacagtacccacacagattgaagttttagataagagataccataaattgtttatcttttgacttgtatagagaggaaagtgataaataaattatggatttataaatgaggtttttttatgtgactgttgttataatacaataatttaattcttaaaaaaaaaaaaa

SEQ ID NO: 405 - DNA, 671 bp, Diabrotica virgifera
  misc_feature (1)..(671): RNAi target sequence
gggaaccttattttatggtgtcgtgccagcagaaaattttaaaaattcttgtaattgtttagacatttcgcaacaattgtgaacaattttggaaaatattgcttgaaagctataattctagatgtaagagcaaagttttgtagtcaaaatggctggagtattcgatttagaactgcatgatgttgaaactgtagaagtagatgattcagacgatgcaatcgaaattgaagaggatgaatatgatcaaaatcctaatattaatgcaattgtagaatccgatgatacagaaacggttcatctgactgaacaaattgtgaacccgggccaggaaaaaaccggaccccatgactttgaattacgcaaagtcctgggcaaaggaggttatggcaaagtatttcaagttagaaaaattacggggaaagatgccaatactgtctttgccatgaaggttctccgcaaggcttccatagttagaaatcaaaaagatactgcccatacgaaagcagaacgaaatattttagaagaagttaagcatccttttatagtggatttgatatatgccttccaaacgggtggaaaattgtacttaattttagaatacctcagcgggggcgaactttttatgcatttagaaagagaaggaatatttttagaggataccgcttgctttt

SEQ ID NO: 406 - DNA, 21 bp, Artificial Sequence
  primer
  misc_feature (1)..(21): forward primer
gaaccttattttatggtgtcg

SEQ ID NO: 407 - DNA, 22 bp, Artificial Sequence
  primer
  misc_feature (1)..(22): reverse primer
aaaagcaagcggtatcctctaa

SEQ ID NO: 408 - DNA, 2032 bp, Diabrotica virgifera
  misc_feature (1)..(2032): WCRW transcript ta00443.001_diavv
gggggagacataaccttattttatggtgtcgtgccagcagaaaattttaaaaattcttgtaattgtttagacatttcgcaacaattgtgaacaattttggaaaatattgcttgaaagctataattctagatgtaagagcaaagttttgtagtcaaaatggctggagtattcgatttagaactgcatgatgttgaaactgtagaagtagatgattcagacgatgcaatcgaaattgaagaggatgaatatgatcaaaatcctaatattaatgcaattgtagaatccgatgatacagaaacggttcatctgactgaacaaattgtgaacccgggccaggaaaaaaccggaccccatgactttgaattacgcaaagtcctgggcaaaggaggttatggcaaagtatttcaagttagaaaaattacggggaaagatgccaatactgtctttgccatgaaggttctccgcaaggcttccatagttagaaatcaaaaagatactgcccatacgaaagcagaacgaaatattttagaagaagttaagcatccttttatagtggatttgatatatgccttccaaacgggtggaaaattgtacttaattttagaatacctcagcgggggcgaactttttatgcatttagaaagagaaggaatatttttagaggataccgcttgcttttatttatccgaaatcattctcgccctagaacatttacatggacaaggaattatttatagagatctaaagcctgaaaatattttacttgacgcccacggtcacgttaaattgacagatttcggtctgtgtaaagaacacattaacgaaggcatattgacccacacgttttgtggaactattgaatatatggcacctgaaattttaactagacatggccatggaaaagaggttgattggtggtcattaggggcattgatgtacgatatgttaactggtgcacctccgtttaccgctgaaaatagaaaaaagacaatagaaaaaattactaaagggaaaactaaaccttccgccttatttgaccgccgatgctcgtgatttagtacgcaaattactaaagaggcaggttccttcgagattaggggctcctcccgatgatgcaaatgctgtcaaacgacatcaattcttcaaacacatcgtctgggatgatgtcctgagaagaaaatatgaacctccatttaaaccaagtcttgctagtgatgatgatgtctctcagtttgataccagatttacaaaacaaactccagtagattcgccggacgaatcgactcttagtgaaagtgccaacatgatattccagggctttacctacatagcaccctccgtcttggaagatatctataaaccaacgatagtaaaagctcgctctccccgtaaaggttcctatcgccctcatttcggttttacgcctactcatcatagtcatcccaataacctggatccgaattgcagctacgtagcaggaatgtcttctgcgcacgctgcgcactccaatcacgtgcctccacatgctgcacacggacttgcgcatcatccacatgcgcaccatcataacccgtttgctccacaagcagtctttaatataccaacaaatgcatgcgcagacgagatgatggaagtcggcagcggactacctcatgtatagtatatatatgatagattaggaccggtctttttatataagagttgataggaagtttttgataggtatcgattcattagttcaattttgttttttatgattaatattattttgactggaggtgtcaaatttcctaatgatagatttagcttcccttgatcgatcacattataaaatacaataatttttgaactgaagtatcgcatgtgtcaaaagttgatatctttggaaaataaagactatattatgtgttgttatacatttaatttgttgaagtctagttacaaaaggctcaattttgttaaaataggtttggcaagtgcacctaggtcagtatgggttgcgaatttaaaatggttataaaaaatatgctca

SEQ ID NO: 409 - DNA, 612 bp, Diabrotica virgifera
  misc_feature (1)..(612): RNAi target sequence
gagcttgcgatttttatttttgaaaaatagagagtattctctaatatttaaggacagtatggaagacgattgggctgtggataatcagagtggtggagttgtcgccccaaaaattgcagaactacctgaaattaagttgttcgctagatggaactgcgatgatgtccaagtttcagacatgtcccttcaggactacattgcagtgaaagaaaaaaatgcaaagtatttaccccattcagctggtagatatgctgcaaaaaggttccgtaaagcacaatgcccaatcgttgagaggttaacaaactctctaatgatgcatggacgtaacaatggtaaaaaattgatggctgtcagaattgttaaacatgcttttgaaattatccatttactaactggagaaaatccattacagattttagtttctgctattatcaattcaggacctagagaagattctactcgtattggtagagctggtactgtaagaagacaagctgttgatgtgtcacccttgagaagggttaaccaagcaatttggttgctctgcacaggtgctagggaagcagcattccgtaatattaaaactattgctgaatgtttggctgatgaatt

SEQ ID NO: 410 - DNA, 23 bp, Artificial Sequence
  primer
  misc_feature (1)..(23): forward primer
gagcttgcgatttttatttttga

SEQ ID NO: 411 - DNA, 22 bp, Artificial Sequence
  primer
  misc_feature (1)..(22): reverse primer
aattcatcagccaaacattcag

SEQ ID NO: 412 - DNA, 780 bp, Diabrotica virgifera
  misc_feature (1)..(780): WCRW transcript 454run3_isotig03469
aagttttatccatatttattattggaaataaaatataaaatgagaaataaatttaacggttggatttggctacacgttcaagttcatccttctttttgatagcatatgaatttgatgatcccttggcagcattgattaattcatcagccaaacattcagcaatagttttaatattacggaatgctgcttccctagcacctgtgcagagcaaccaaattgcttggttaacccttctcaagggtgacacatcaacagcttgtcttcttacagtaccagctctaccaatacgagtagaatcttctctaggtcctgaattgataatagcagaaactaaaatctgtaatggattttctccagttagtaaatggataatttcaaaagcatgtttaacaattctgacagccatcaattttttaccattgttacgtccatgcatcattagagagtttgttaacctctcaacgattgggcattgtgctttacggaacctttttgcagcatatctaccagctgaatggggtaaatactttgcatttttttctttcactgcaatgtagtcctgaagggacatgtctgaaacttggacatcatcgcagttccatctagcgaacaacttaatttcaggtagttctgcaatttttggggcgacaactccaccactctgattatccacagcccaatcgtcttccatactgtccttaaatattagagaatactctctatttttcaaaaataaaaatcgcaagctcttgctgaacgacggcgtgaaccggaaaaggt

SEQ ID NO: 413 - DNA, 630 bp, Diabrotica virgifera
  misc_feature (1)..(630): RNAi target sequence
gcttctttttcgttggatgtctttgtaggttttaaaaatgggagcctacaagtatatacaggagttgtatagaaaaaaacaaagtgatgttcttagatttttactgagagtgagagtctggcaatatcgccaattgactaaactccacagaactcccagacccagtcggcctgacaaggctcgcagaatgggttacagggccaagcaaggttttgttatttaccgtattagagtacgacgtggaggacgcaagcgtccagtaccaaaaggtgccacctacggtaaacccaaaagccatggagttaatgaattgaaacctgtccgtaacttacaagctattgctgaggaacgtgtaggaagaaggtgtggtggattaagagtcctaaactcctactgggtagcccaagattcaacatacaaatattttgaaatcattttggtcgacccctcacataacgctattcgcaaggaccccaaaattaactggattgtcaactcagtacacaaacacagagaactccgtggcaaaacttcctctggcaaatcatctcgtggtttgggcaagggtcacagatactctcaaaccaagggaggatccaggcgtgccgcttggctcagaaggaactcact

SEQ ID NO: 414 - DNA, 22 bp, Artificial Sequence
  primer
  misc_feature (1)..(22): forward primer
gcttctttttcgttggatgtct

SEQ ID NO: 415 - DNA, 22 bp, Artificial Sequence
  primer
  misc_feature (1)..(22): reverse primer
agtgagttccttctgagccaag

SEQ ID NO: 416 - DNA, 1374 bp, Diabrotica virgifera
  misc_feature (1)..(1374): WCRW transcript ta18374.001_diavv
tatataactcggattaccacagtcaaagtgcataaaacttaacaatacgcaaaaaccgtagcagtccgtttatttctttcctgcggccttggctggagccttcttggccttcttaggctttgatttcttatctttcaagatttgtgcccttctcctttcttgcaattttctggatctaatcacgacgttgtcggcactcacggtaataccacgtttcttggccaaaagttcttccctgtttaactgtctcttttgattcttcaaaatggcttcacgtttgagtacagcagcatatggattcaacttaagcatggccttagcgttggtcaatggattgagacgacgtacacgacgtacaaccttcttttgaggagcacgtaatacagctttgatttcatcagccttcaacaatctagatagatcagtgttggccattttaggctggggtagattgtaacccttcttttccaatgatgctgttttccatgtgccgaacaatttatctaaacgttggaaagctgattcagtccaaataacaaagcgacctacatgaccaccaggagcaagtttcaacaaatttaacttctgtacgctaatgaggtcaatgcctgggatgttacggaaagcacgacgaagacctacaagggggacttgcgcgttgaactttctttttcgttggatgtctttgtaggttttaaaaatgggagcctacaagtatatacaggagttgtatagaaaaaaacaaagtgatgttcttagatttttactgagagtgagagtgtggcaatatcgccaattgactaaactccacagaactcccagacccagtcggcctgacaaggctcgcagaatgggttacagggccaagcaaggttttgttatttaccgtattagagtacgacgtggaggacgcaagcgtccagtaccaaaaggtgccacctacggtaaacccaaaagccatggagttaatgaattgaaacctgtccgtaacttacaagctattgctgaggaacgtgtaggaagaaggtgtggtggattaagagtcctaaactcctactgggtagcccaagattcaacatacaaatattttgaaatcattttggtcgacccctcacataacgctattcgcaaggaccccaaaattaactggattgtcaactcagtacacaaacacagagaactccgtggcaaaacttcctctggcaaatcatctcgtggtttgggcaagggtcacagatactctcaaaccaagggaggatccaggcgtgccgcttggctcagaaggaactcactgcaattgcgcagaaaacgttaaaatttatttttttataattagaccaataaaatttacggattaaaaaaaaaaaaaaaaaa

SEQ ID NO: 417 - DNA, 663 bp, Diabrotica virgifera
  misc_feature (1)..(663): RNAi target sequence
  misc_feature (570)..(570): n can be any nucleotide
gggcgaaactgttcttcattatcctttctaggtcgtgtaaaatacgtgaaggccaaaatgggtagacgacctgcgaggtgctaccgttattgtaaaaacaaaccctaccccaaaagtcgtttctgcagaggtgttccagatccaaaaatccgtattttcgatttgggtaagaagaaggcttccgtagaagactttcctctatgtgtacatttagtttctgacgaatatgaacagctaagttctgaagcattagaagcaggacgtatctgttgtaacaaatatttggtaaagaactgtggtaaagatcaattccacattcgtatgagactccatcctttccatgttatcagaatcaacaagatgttgtcatgtgctggagctgatagactccagactggaatgagaggagctttcggcaagccccaaggtacagttgctcgtgtccgcattggtcaacctattatgagtgtacgctctagtgatcgtttcaaggctgcagttattgaggctctccgtcgtgccaagttcaagttcccaggtcgtcaaaagatctatgtatcgaagaaatgnggattcaccaagtatgaacgtgaacaatatgaaaacttaaaacaacaaggtagattagctcctgatggttgcaatgttcaatacaggccagag

SEQ ID NO: 418 - DNA, 20 bp, Artificial Sequence
  primer
  misc_feature (1)..(20): forward primer
gcgaaactgttcttcattat

SEQ ID NO: 419 - DNA, 22 bp, Artificial Sequence
  primer
  misc_feature (1)..(22): reverse primer
ctctggcctgtattgaacattg

SEQ ID NO: 420 - DNA, 726 bp, Diabrotica virgifera
  misc_feature (1)..(726): WCRW transcript ta04337.003_diavv
gaaggtttgtttcttaatttattttaacaatcttacgtttttagttgtagtgatatatttttataaactaaatactgaatacgtaataacgtatatgtgttagttttttaatctacatatttattttctattttcaggccaaaatgggtagacgacctgcgaggtgctaccgttattgtaaaaacaaaccctaccccaaaagtcgtttctgcagaggtgtcccagatccaaaaatccgtattttcgatttgggtaagaagaaggcttcagtagaagactttcctctatgtgtacatttagtttctgacgaatatgaacagctaagttctgaagcattagaagcaggacgtatctgttgtaacaaatatttggtaaagaactgtggtaaagatcaattccacattcgtatgagactccatcctttccatgttatcagaatcaacaagatgttgtcatgtgctggagctgatcgactccagactggaatgagaggagctttcggcaagccccaaggtacagttgctcgtgtccgcattggtcaacctattatgagtgtacgctctagtgatcgtttcaaggctgcagttatcgaggctctccgtcgtgccaagttcaagttcccaggtcgtcaaaagatctatgtatcaaaggaaatggggattcaccaagtatgaacgtgaacaatatgaaaacttaaaacaacaaggtagattagctcctgatggt

SEQ ID NO: 421 - DNA, 625 bp, Diabrotica virgifera
  misc_feature (1)..(625): RNAi target sequence
gcgaaagttgtgtcttgaaaagtaaaaatgacgtctaaagtatctcgtgatactctatacgagtgtgtgaatggagtcttggaaaatgccaaggagaagaaaaggaactttttggaaaccgtggaactccagatcggtcttaagaactacgatccccaaaaggacaagcgtttcagcggaaccgtcaaactaaagcacattcctcgtccaaagatgcaggtatgcatcttgggagatcagcaacattgtgatgaagctaacgctaacaatgttccattcatggatgtagaagccttgaaaaaattgaacaaaaacaagaaattggttaagaaactagccaagaaatatgatgctttcctcgcttctgaagctctcatcaaacagatccccaggttgttgggtccaggtttgaacaaggctggtaaattccctggtcttctctcccaccaggaatccatgacacagaaaattgatgaagtaaaagcaacaatcaaattccaaatgaagaaggtactctgcctctctgttgctgttggtcatgtaggcatgaatcaagatgaattggttcaaaatgtccatctttcaatcaacttcttggtctcactgttgaagaaacattggcaga

SEQ ID NO: 422 - DNA, 22 bp, Artificial Sequence
  primer
  misc_feature (1)..(22): forward primer
gcgaaagttgtgtcttgaaaag

SEQ ID NO: 423 - DNA, 22 bp, Artificial Sequence
  primer
  misc_feature (1)..(22): reverse primer
tctgccaatgtttcttcaacag

SEQ ID NO: 424 - DNA, 1055 bp, Diabrotica virgifera
  misc_feature (1)..(1055): WCRW transcript ta02345.005_diavv
aagactagtaccttcacataatatggagaatctcctgggttgaacatagaaaaaaatgtataatgtatccataatagaacaactcaatataaaagataggttgcttaaacaaacacaacagagatacagtattttggacacatttcctgaagaacaggaacactttatcattcctggtgcatttcgttaacgtagacaagccgcaaaagttgtgtcttgaaaaataaaaatgacgtctaaagtatctcgtgatactctatacgagtgtgtgaatggagtcttggaaaatgccaaggagaagaaaaggaactttttggaaaccgtggaactccagatcggtcttaagaactacgatccccaaaaggataagcgtttcagcggaaccgtcaaactaaagcacattcctcgtccaaagatgcaggtatgcatcttgggagatcagcaacattgtgacgaagctaacgccaacaatgttccattcatggatgtagaagccttgaaaaaattgaacaaaaacaagaaattggttaagaaactagccaagaaatatgatgctttccttgcttctgaagccctcatcaaacagatccccaggttgttgggtccaggtttgaacaaggctggtaaattccctggtcttctctcccaccaggaatccatgacacagaaaattgatgaagtaaaagcaacaatcaaattccaaatgaagaaggtactctgcctttctgttgctgttggtcatgtaggcatgaatcaagatgaattggttcaaaatgtccatctttcaatcaacttcttggtctcactgttgaagaaacattggcagaacgttaggtctctccacgtcaaatcatctatgggacccccacaaagattgtattaagttataatttttatactgagacttttatttacacacttaaatgtgggtatctaaataaacatcgtttttaagttctttaaaaaaaaaaaaaatagaaaaaaaaaatgattggatgtacatattatactaccctactaagtaaaaaaatacatctaaaaaaaaaaaaaaaaaa

SEQ ID NO: 425 - DNA, 693 bp, Diabrotica virgifera
  misc_feature (1)..(693): RNAi target sequence
gggggacattttcgtttgtaaataacaaataacagtaaagtaaagaataaaaattgaagaattttatatgattcctttaattttcgtcttcaaatagcatataagttatattctgagtttataaaattaacaccatgcctacgataatattgctggacgtgtctctttctatgacgaggcctgttcaagttggtgagggctttgaaacagtctcaagaaagcaactggcggaattagggattaatgcatttttggattatcttagcatacattccaaattagagtttatatctttgatggctttttcgtcattgtacgaggagaggtgtccttttaccagagattacaatgctattaaagcagaattaaagaatatagaagactatgataaaacttgcattgaaacagcgcttcatggtgttaatcacatggttcttggagagtgggggaataacacggcttgtcaggtattattagtaacggatggaaatactggaattggaacgaattccttgaaagaagcaattgctacaatgaatcaaaggaataataaaataccatttcctgttcctttttcattcccaggaaaattacatgtggtgtgtctcacttctccctgtgatttaagttttattaaatctaaaccactttttcagaggttgattgatttaagtggttacgacggatcaattt

SEQ ID NO: 426 - DNA, 21 bp, Artificial Sequence
  primer
  misc_feature (1)..(21): forward primer
gggggacattttcgtttgtaa

SEQ ID NO: 427 - DNA, 22 bp, Artificial Sequence
  primer
  misc_feature (1)..(22): reverse primer
aaattgatccgtcgtaaccact

SEQ ID NO: 428 - DNA, 1551 bp, Diabrotica virgifera
  misc_feature (1)..(1551): WCRW transcript ta10911.001_diavv
ggacattttcgtttgtaaataacaaataacagtaaagtaaagaataaaaattgaagaattttatatgattcctttaattttcgtcttcaaatagcatataagttatattctgagtttataaaattaacaccatgcctacgataatattgctggacgtgtctctttctatgacgaggcctgttcaagttggtgagggctttgaaacagtctcaagaaagcaactggcggaattagggattaatgcatttttggattatcttagcatacattccaaattagagtttatatctttgatggctttttcgtcattgtacgaggagaggtgtccttttaccagagattacaatgctattaaagcagaattaaagaatatagaagactatgataaaacttgcattgaaacagcgcttcatggtgttaatcacatggttcttggagagtgggggaataacacggcttgtcaggtattattagtaacggatggaaatactggaattggaacgaattccttgaaagaagcaattgctacaatgaatcaaaggaataataaaataccatttcctgttcctttttcattcccaggaaaattacatgtggtgtgtctcacttctccctgtgatttaagttttattaaatctaaaccactttttcagaggttgattgatttaagtggttacgacggatcaattttggtgccagacaatattcatagtgaatcgagcgtaattagtttatttcagaaacttgctgaagacatgtacacaacatttaagggcaccctaaagtgtggcaatttagaatcaaaaataatattgtcgccagctcctgtggcttatacaaagtttacggattttgaatgcaacacatataacatgtcagaactaatagaagtgtgcggtttcgtatcagttacggatgtagggtcaccgatggccattagccgtcatctaattcttccagccagttctccaaccaaacaagaaagtgttgccaaaaatgacacggaagccaccgaagatgacagcactgacgaagcgaaaataccatcattttgtgtactacttcatggagctttaagagtagagaatatggcagcattggtgaatataggagaaaactggttcggattcgtatattcctgggcagattcgaagaaaaagtcaaatttgatgctaactattttaatgccaggcactgatatcataccttggttaggagatttaaattgtttgggatccgcagaatcttattcgtctgagcaaataggcagttttcctattaaacctatggagaagaggagttactctcagaacggagtcgtttggattcgccaagcaggtctgcaatcggatattcagaaaatattacgacatgcaagaaagttgcccgagaaaactcagcaattctataaggaacttaacaggcttagaaaagcagcaatatccttaggtttcttggatcttttaaacggattggcttatatttttgaacaagaatgtttacagttacctccaagtgcacatccagattgtgctgtccagttacaacatg

SEQ ID NO: 429 - DNA, 651 bp, Diabrotica virgifera
  misc_feature (1)..(651): RNAi target sequence
gggggctcttagttatccatcttggcttcgtttaggttttagcttagcactagcaccacgttttcgttttaagttgactgttgactttggccattgtttcaagtgtagttgtcttatcgttatcgttacaatttgaaatttggattgagtttgagttgttaggaccaggaccaggtttataacacaagtggatatctattcatcatggcaattgattgggaaaaaattgtaactgaactaagtgctgtgttccaagatgagcaagagacatttgcgagagttttgttttatttaggagaagaagaaaaggtgtataaagatgccgataaactaggaccgcagatgaagatcttaatgtcatctatgaaagtagcatctttgtttagtcagtacgccaaacggttagcagaggacacaaagagggctgattcggatgaaaagttcaaacgagtgatgggtctaatctgggcccaaatgatggacgctaacaaacagacagatgacaaagataaaaccccagatgtaagcattattgccaaattagaacacctgtctctagaagcttcgccaggaatggttcgcgccttgagcattattccatatgaaagccaaaagcgttttttagtaatgctcaaagacatcgtaccaaca

SEQ ID NO: 430 - DNA, 22 bp, Artificial Sequence
  primer
  misc_feature (1)..(22): forward primer
gggggctcttagttatccatct

SEQ ID NO: 431 - DNA, 22 bp, Artificial Sequence
  primer
  misc_feature (1)..(22): reverse primer
tgttggtacgatgtctttgagc

SEQ ID NO: 432 - DNA, 1310 bp, Diabrotica virgifera
  misc_feature (1)..(1310): WCRW transcript ta05539.003_diavv
cagagacttcatgctcatgctccttctcttagttatccatcttggcttcgtttaggttttagcttagcactagcaccacgttttcgttttaagttgactgttgactttggccattgtttcaagtgtagttgtcttatcgttatcgttacaatttgaaatttggattgagtttgagttgttaggaccaggaccaggtttataacacaagtggatatctattcatcatggcaattgattgggaaaaaattgtaactgaactaagtgctgtgttccaagatgagcaagagacatttgcgagagttttgttttatttaggagaagaagaaaaggtgtataaagatgccgataaactaggaccgcagatgaagatcttaatgtcatctatgaaagtagcatctttgtttagtcagtacgccaaacggttagcagaggacacaaagagggctgattcggatgaaaagttcaaacgagtgatgggtctaatctgggcccaaatgatggacgctaacaaacagacagatgacaaagataaaaccccagatgtaagcattattgccaaattagaacacctgtctctagaagcttcgccaggaatggttcgcgccttgagcattattccatatgaaagccaaaagcgttttttagtaatgctcaaagacatcgtaccaacaacagtgctatcgaatgtagagtatgttgttgaaactgttaacaaagtaggtggtgctgtagtaactgtagctttagctagtatacaattggcatatgaagctattgttaacattagaagatggtggaatggagagatttcaggcaagagatgttgtaaaaatattatagattcacttgctacaattggtggtagcgttggtggaggatttgctggtgtagctttgggagcacttggaggtccagttggcatgataatcggaggtattggtggaggaatgttgggcggagaattggccaagcgtctgtcgcaatggatgactgaaaaggtatttgatgttccaaaatctgaggcgctagaaaatgcttataatttctttaatttgcgcaatcatgcttccaatcatcagataaatacagcttacagacagaagtgtctagaataccatcctgataaaggaggttctgaggaaatgttccataaagtgcagatggaaatggcggttattaaagctgccaaaggagaattgtattcataataattagtttgtatttttgtacttagatttagattatataacatattttgtactatactattttatgtacacattatatttgtacagaaataaaaattaacg

SEQ ID NO: 433 - DNA, 658 bp, Diabrotica virgifera
  misc_feature (1)..(658): RNAi target sequence
  misc_feature (546)..(546): n can be any nucleotide
atgtttttaagatgggccagtgccagtcacacattgtgtttaagtttattttcgtgtttcttgctgggtacgaccgagtaacgaacaacctaggatatcacgccaaattcacaagtaacaagttccagtcctggagtaggagcagccctggcggcgttaggaagtctcggtggaatcttcggcaatcacttacaaatgttaggaagcttaccagctttccagagtccgcagagcctgcaacagctgcagcagctggcgatgctgcagcaggctagcggcaaccagatgaatccgcaggctcagtttttatttcaaaatcagggttttctacaagggttccctagaacaagtataccttctagacccccacatacaatgcaggtacaacaaatagcacaagctgcccagcaactacagcaactgcagaaagtacagcaaaacacaaaccaacacaataccagcattcctcaaaatacgacgttacctcatcaaacgcagaccacgcctccaaacaaccacaatatacctgccagcatgcttactccnagcacgcctagttctggtggacttacgccgcagcatcttaaaacaccctcaaggatactggaaccatctccagaagaaaccacagatttggaagaacttgaacagtttgcga

SEQ ID NO: 434 - DNA, 22 bp, Artificial Sequence
  primer
  misc_feature (1)..(22): forward primer
atgtttttaagatgggccagtg

SEQ ID NO: 435 - DNA, 22 bp, Artificial Sequence
  primer
  misc_feature (1)..(22): reverse primer
tcgcaaactgttcaagttcttc

SEQ ID NO: 436 - DNA, 698 bp, Diabrotica virgifera
  misc_feature (1)..(698): WCRW transcript ta21806.001_diavv
  misc_feature (566)..(566): n can be any nucleotide
ggagtgcatattgcccgcagatgtttttaagatgggccagtgccagtcacacattgtgtttaagtttattttcgtgtttcttgctgggtacgaccgagtaacgaacaacctaggatatcacgccaaattcacaagtaacaagttccagtcctggagtaggagcagccctggcggcgttaggaagtctcggtggaatcttcggcaatcacttacaaatgttaggaagcttaccagctttccagagtccgcagagcctgcaacagctgcagcagctggcgatgctgcagcaggctagcggcaaccagatgaatccgcaggctcagtttttatttcaaaatcagggttttctacaagggttccctagaacaagtataccttctagacccccacatacaatgcaggtacaacaaatagcacaagctgcccagcaactacagcaactgcagaaagtacagcaaaacacaaaccaacacaataccagcattcctcaaaatacgacgttacctcatcaaacgcagaccacgcctccaaacaaccacaatatacctgccagcatgcttactccnagcacgcctagttctggtggacttacgccgcagcatcttaaaacaccctcaaggatactggaaccatctccagaagaaaccacagatttggaagaacttgaacagtttgcgaagacgttcaaacagagaagg

SEQ ID NO: 437 - DNA, 647 bp, Diabrotica virgifera
  misc_feature (1)..(647): RNAi target sequence
  misc_feature (524)..(524): n can be any nucleotide
aatttcagccgtcatctgttgtgttggtgtgtctgtatttttgtgaatttcgcaaatatttttgattctaataacaaaaccttttgctaaattcagtgaatcatagtgctactttcttgttaaattcataagggaaagaagcatcaaccaacaaaaaattgtgaatgttctcctagagagatttcaactaacttcagagcaactctatatcattcaaggaaataaggagtttttattgactcctgaaatatttaatgtactagataagatccaagaaatacgcaatgattgtaaaatacttatgcagtctggtcttcaaacgttggctttagatattatggagcaaatgaccacatatcaggaggcagggttggaaaaattatatagatggacccaaagtcactgtagaaatgttgaaaaccctgaattaacagatctagttacacaatcaatggcaaggcttcaacacagacaagttttgtttaagtatgtaatcgatgaatactgcatatgtcgcagaagcnagataactgatgattttatcaacgctctaacacgaggagggccatctggaaatcctgctcctatagaaatgagagctcacgattctcagatctatgtcacagatatgctcgtttggttgaaca

SEQ ID NO: 438 - DNA, 22 bp, Artificial Sequence
  primer
  misc_feature (1)..(22): forward primer
aatttcagccgtcatctgttgt

SEQ ID NO: 439 - DNA, 22 bp, Artificial Sequence
  primer
  misc_feature (1)..(22): reverse primer
tgttcaaccaaacgagcatatc

SEQ ID NO: 440 - DNA, 727 bp, Diabrotica virgifera
  misc_feature (1)..(727): WCRW transcript ta21805.001_diavv
  misc_feature (540)..(540): n can be any nucleotide
ggcaatcgataccaaaaatttcagccgtcatctgttgtgttggtgtgtctgtatttttgtgaatttcgcaaatatttttgattctaataacaaaaccttttgctaaattcagtgaatcatagtgctactttcttgttaaattcataagggaaagaagcatcaaccaacaaaaaattgtgaatgttctcctagagagatttcaactaacttcagagcaactctatatcattcaaggaaataaggagtttttattgactcctgaaatatttaatgtactagataagatccaagaaatacgcaatgattgtaaaatacttatgcagtctggtcttcaaacgttggctttagatattatggagcaaatgaccacatatcaggaggcagggttggaaaaattatatagatggacccaaagtcactgtagaaatgttgaaaaccctgaattaacagatctagttacacaatcaatggcaaggcttcaacacagacaagttttgtttaagtatgtaatcgatgaatactgcatatgtcgcagaagcnagataactgatgattttatcaacgctctaacacgaggagggccatctggaaatcctgctcctatagaaatgagagctcacgattctcagatctatgtcacagatatgctcgtttggttgaacaaagcgattgctttggaaaagcagaatgttagtttattgttgaaattgtgcaataaagtagagct

SEQ ID NO: 441 - DNA, 711 bp, Diabrotica virgifera
  misc_feature (1)..(711): RNAi target sequence
gggggataagataataaatcgaacatacctgtttcgactctatgtggaatttgtcagtgcatggttatgcaatttagttaaaggttaaggataataattagtggaaaaaatgagttgcggttttgattcacaaagaatttatatgctaggtgaaaaatattcaggtctaaaagctagaggtgctctccaaaattatgaagaaattagaaagaaatatctgctgaacaatgcattattcgaagactcacaatttcaagtagaaaaagtagaactcggacaagagtgggacaatcataagaacaacattaagtggctccgaccccaggaaatggtttccgatccagtttttctagaagctcatgaagacaggttcgatattaaacaaggaactttgggcgattgctggtttttagcagctttggcaaacataacagacaataataaaataatgcagcgtattataccagacaatcaaagcttttctcaagattatgcaggagtatttcatttcaggttttggcaatatggtagatggatagacgtggttattgacgacaaattacctactatagatggtaaacttatctttactaagaccaaatttagcaacgtattttggacacctttattggaaaaagcatatgcaaaactgtatggatcttataaaaatattgaggggggctttatttctgaagctctggaagatttcac

SEQ ID NO: 442 - DNA, 24 bp, Artificial Sequence
  primer
  misc_feature (1)..(24): forward primer
gggggataagataataaatcgaac

SEQ ID NO: 443 - DNA, 23 bp, Artificial Sequence
  primer
  misc_feature (1)..(23): reverse primer
gtgaaatcttccagagcttcaga

SEQ ID NO: 444 - DNA, 2478 bp, Diabrotica virgifera
  misc_feature (1)..(2478): WCRW transcript ta05594.001_diavv
gggggataagataataaatcgaacatacctgtttcgactctatgtggaatttgtcagtgcatggttatgcaatttagttaaaggttaaggataataattagtggaaaaaatgagttgcggttttgattcacaaaaaatttatatgctaggtgaaaaatattcaggtctaaaagctagaggtgctctccaaaattatgaagaaattagaaagaaatatctgctgaacaatgcattattcgaagactcacaatttcaagtagaaaaagtagaactcggacaagagtgggacaatcataagaacaacattaagtggctccgaccccaggaaatggtttccgatccagtttttctagaagctcatgaagacaggttcgatattaaacaaggaactttgggcgattgctggtttttagcagctttggcaaacataacagacaataataaaataatgcagcgtattataccagacaatcaaagcttttctcaagattatgcaggagtatttcatttcaggttttggcaatatggtagatggatagacgtggttattgacgacaaattacctactatagatggtaaacttatctttactaagaccaaatttagcaacgtattttggacacctttattggaaaaagcatatgcaaaactgtatggatcttataaaaatattgaggggggctttatttctgaagctctggaagatttcaccggtggactaaatgaaagataccttgatttagcaaacatttcaaaacatgaggaccttttcaaaatgatgctaatttcatttatgagaaaatcgtacatgggctgtggtatcctggattctggtgaagttgaaggagaaagaaaagatggactttattcaagtcatgcttacagtataaacaatgtagtggaggttacctcaaaagctgaaaaagtctataagttgcttaggcttaggaatccatggggcacgggtgagtggacaggcgactggagtgaccattcaaaaacctgggaccttcttccagacgaaactaaaaataagttattagtgataaaggatgatggagaattttggatgcaacacgaggatttcattaaagattataatttgttagaattttgtcaccctaatcccgactcactagaatatgaagaagatgaatcacataaatggaacatttttatgcttgatggcagttgggttgcaaaaattagtaatggaggtcagccacatagtacaagtttttggcataactcgcaatatttgttaaaaataaatgatagtagtaatgctatacacagagtagtaattggattaatgcagaagaatagaagactgtacaatcttcccaagattcctataggatttgctgtgtatgaactaaaatccgtttctggacgtttaacgcataattttttctcctcaattaaacctatatatattagagaaccagagaacaatacacaggttacgggacacatagatttaccaaaaggatcctactgcataataccatttacagatgaaccacaagcaagctgtgaatttcttttaagggtttactctactgttacatttgatgttaatgaacacgaagtagatgttcgattgatagatccaacagtaccattaggagggttacgtgcacctgtagacgcagtagatggtgcggctgccgataaaggaataaaacatgtattcgagaactatgctgataaagaattagaaataggttggaaggaactagtatctatactagaacttcttttctcaacagaacaacacatattttcaaaggaactgtgtcgaagtatggttgcattagcggatactgacctttcaggaaaactcaattttcaggaattctatgagctttgggaacaaattggagaattaaaaggcattttcaaaaattttgattcagatagttccaacggaatgtcagtgcgtgaacttagacaggctcttagagtagctaatttccaacttagcaataaaattttatccctaattggactgagatacgcaaacgaaaaagatgagttggaattagaagactttttgcattgttgcgttaaattaaaattaatgatagatatttacaactccaaaaagaaaagagaatatggcttggaggaatggttacttgaaacaatgtatgcttaaggtgcaagaatatttttgttatattttttattggtttgataaaataaaatgaatattccagtatataaatatatgagttgattgaaatatccataatatttcaatcaaccatattttataagtatttaacatgtctgtaaaaaaaagaaatctaatagaacttttaacgttattattaatactgatgatagatggcatcgcatgtacgtgtataaaataaaaattgaatactgcaaatgaaagagaatatacataatattatgtacatagtttggaaatagtatatttgtttgaaacgatttatactaacagtaatc

SEQ ID NO: 445 - DNA, 579 bp, Diabrotica virgifera
  misc_feature (1)..(579): RNAi target sequence
cgccatttttgttttcgtagttggaggcgatgtagggaactcaatcgattcatacaaaacttttactggaatgaagcatttcagcggaaacctcatgtttctgtcctgagccgtttagaagttgtacgtagttgaaatgggggaaaatataagtggacacccggtataatatgcagatgaatgtagaaaaaacacaatatttatgcctaggtgaagattcaactgatatgatattggacaatataatcagaaaataactagttgtggtaaatataagtatttgggaattaatttcagcaaagaagatgcggacgatgcagaaattaagagcacagtcaataaagaaagaacgataattagagatataattaaatcattgaacggagttttgtggagtaccaagatagagaaacaaagaaaaatgagaatatacaacaccatgattaagagcacattggtatagggatccgaaacatggagagtaaaggaacaccaaaaaagtaaaatagaagctaccgagatggacgccctaagaagagcaagtagaacatcgagattggaccgggttagaaatgagta

SEQ ID NO: 446 - DNA, 22 bp, Artificial Sequence
  primer
  misc_feature (1)..(22): forward primer
cgccatttttgttttcgtagtt

SEQ ID NO: 447 - DNA, 22 bp, Artificial Sequence
  primer
  misc_feature (1)..(22): reverse primer
tactcatttctaacccggtcca

SEQ ID NO: 448 - DNA, 628 bp, Diabrotica virgifera
  misc_feature (1)..(628): WCRW transcript ta21896.001_diavv
gtaaattcattatttgctttacttactcatttctaacccggtccaatctcgatgttctacttgctcttcttagggcgtccatctcggtagcttctattttacttttttggtgttcctttactctccatgtttcggatccctataccaatgtgctcttaatcatggtgttgtatattctcatttttctttgtttctctatcttggtactccacaaaactccgttcaatgatttaattatatctctaattatcgttctttctttattgactgtgctcttaatttctgcatcgtccgcatcttctttgctgaaattaattcccaaatacttatatttaccacaactagttattttctgattatattgtccaatatcatatcagttgaatcttcacctaggcataaatattgtgttttttctacattcatctgcatattataccgggtgtccacttatattttcccccatttcaactacgtacaacttctaaacggctcaggacagaaacatgaggtttccgctgaaatgcttcattccagtaaaagttttgtatgaatcgattgagttccctacatcgcctccaactacgaaaacaaaaatggcggatttttgaaaaaaactctgttgccc

SEQ ID NO: 449 - DNA, 539 bp, Diabrotica virgifera
  misc_feature (1)..(539): RNAi target sequence
ctatatgagacgaggccagacaccatatggaggagtacatcttgctgatggcgttgtagctgatggtttatgggacgtttacaacaaattccatatgggtaactgcacagaaaacacagcaaagaagctgaacatctccagggctgaacaggatgagtatgctatcaacagttacaagaaaagtgccgaagcatacaaaaacaatgcttttgcttctgaattagtatcagttaatgtaccacaaaggaaaggacaaccagatttggtggtttcagtagatgaagagtacaaaagggttaactttgaaaagtttaacaaactgccaacggttttccaaaaggaaaacggcacagtaacagctggaaacgcttcaactttaaacgacggtgcagctgctttgatcttaaccactgccgaaaatgccaagaggttaaacgctgaacctctagctcgagttgttggttaccaagacggtgaatgtgacccaatcgatttcccaatagcccctgccgtagctattccaaaattgctcgaaaaga

SEQ ID NO: 450 - DNA, 22 bp, Artificial Sequence
  primer
  misc_feature (1)..(22): forward primer
ctatatgagacgaggccagaca

SEQ ID NO: 451 - DNA, 22 bp, Artificial Sequence
  primer
  misc_feature (1)..(22): reverse primer
tcttttcgagcaattttggaat

SEQ ID NO: 452 - DNA, 1541 bp, Diabrotica virgifera
  misc_feature (1)..(1541): WCRW transcript ta05758.001_diavv
ttattgtaaaataagtgttgcagttatttaaaatcgtatgtttataattttttcatattagttgaacaagggtagggtcaaagtttaatccaaagtggtggggaaggagaatactttatcacttatttgttctggaaatattttgagaattgtcgttcacttattttagaagataggcttaaaaatgatcatgtcaaagccaactaaggttattcaaatgagcagaagattctacagctctggctctaaaaacgatattgttattatttctgcagttcgaactccaatgggtacgtttctgggacccttagcacctttatcagctcccagattgggagcagttgccatacaagcagctgttgaacgagctggaattcccaaagaagaagtcaaagaagtcttcatgggccatgtttgtcaaggaggcgctggacaggccccagccagacaggctacagtttttgcaggtcttccaaagtcaacaatatgcacaactgtcaacaaagtatgctcatcaggcatgaaatctgtaatgtttgcaacacagagcttgctactcggcgaccaagacgtcatactagccgggggaatggaatccatgtcgaatgtaccatactatatgagacgaggccagacaccatatggaggagtacatcttgctgatggcgttgtagctgatggtttatgggacgtttacaacaaattccatatgggtaactgcgcagaaaacacagcaaagaagctgaacatctccagggctgaacaggatgagtatgctatcaacagttacaagaaaagtgccgaagcatacaaaaacaatgcttttgcttctgaattagtatcagttaatgtaccacaaaggaaaggacaaccagatttggtggtttcagtagatgaagagtacaaaagggttaactttgaaaagtttaacaaactgccaacggttttccaaaaggaaaacggcacagtaacagctggaaacgcttcaactttaaacgacggtgcagctgctttgatcttaaccactgccgaaaatgccaagaggttaaacgctaaacctctagctcgagttgttggttaccaagacggtgaatgtgacccaatcgatttcccaatagcccctgccgtagctattccaaaattgctcgaaaagaccggagtcagcaaagacgaggttgccatgtgggaaatcaatgaagcgttcagcgttgttgtcttagctaaccaaaaaatccttgggctcaatccagacaaagttaacatccacggaggtgctgtcagtttgggccatcccatcggtatgtctggtgccagacttatcactcatctcgttcactctctcaaggctgaagagaaaggagtcggtgctatctgtaatggaggaggaggagcttcttccatgatgatcgagaaattgtaagtggatcttggatctcagaactgaatcttaggtttaagtgcaaaaatcatatattttttaagaattttagatgtgcatttatgaactgatattataattttataaactattttaaatcctg

SEQ ID NO: 453 - DNA, 603 bp, Diabrotica virgifera
  misc_feature (1)..(603): RNAi target sequence
ggggtgtgtatctctgtgctataagtttagtgtaaatactgtaaccttgaaaattttgaagtaacctgtgttttctagaaaattaaggaaacatcaatgaaactttggatcccaagttgaccttgagcgattatcagatcaccgaaatttacgtggtcggaaaaggaacacacagtcttactcaagcattttccagtagcgacattatggcattaagaaaagaagaagaaaggaaacaaatgcataacaagactggaggaggtgtattcaacttaatttttaggagaggaaaatcgagtatgggttcgggttcaatctccagcgatacacgttctatttcgccgactcacagcgacgattcccgctcagttacaccacctgcagtcattcagcaacctattctgccaccgccgaagcaagatccgcctcccgaacgaccgaaacctccacaacgtaaacggagacccgctccgagacctccgcagctaacccctccacagcaggagatacctaaggaggaaactgccattgatgctgaagattctaaagaatctcgtcgaaattcggaagaaaaaccagcgagcaccgtttcagaagttagtg

SEQ ID NO: 454 - DNA, 22 bp, Artificial Sequence
  primer
  misc_feature (1)..(22)
ggggtgtgtatctctgtgctat

SEQ ID NO: 455 - DNA, 22 bp, Artificial Sequence
  primer
  misc_feature (1)..(22): reverse primer
cactaacttctgaaacggtgct

SEQ ID NO: 456 - DNA, 736 bp, Diabrotica virgifera
  misc_feature (1)..(736): WCRW transcript ta14242.001_diavv
  misc_feature (627)..(627): n can be any nucleotide
  misc_feature (629)..(629): n can be any nucleotide
  misc_feature (630)..(630): n can be any nucleotide
  misc_feature (631)..(631): n can be any nucleotide
ggtgtgtatctctgtgctataagtttagtgtaaatactgtaaccttgaaaattttgaagtaacctgtgttttctagaaaattaaggaaacatcaatgaaactttggatcccaagttgaccttgagcgattatcagatcaccgaaatttacgtggtcggaaaaggaacacacagtcttactcaagcattttccagtagcgacattatggcattaagaaaagaagaagaaaggaaacaaatgcataacaagactggaggaggtgtattcaacttaatttttaggagaggaaaatcgagtatgggttcgggttcaatctccagcgatacacgttctatttcgccgactcacagcgacgattcccgctcagttacaccacctgcagtcattcagcaacctattctgccaccgccgaagcaagatccgcctcccgaacgaccgaaacctccacaacgtaaacggagacccgctccgagacctccgcagctaacccctccacagcaggagatacctaaggaggaaactgccattgatgctgaagattctaaagaatctcgtcgaaattcggaagaaaaaccagcgagcaccgtttcagaagctagtgagttgcagtcgaaaaaaatcgaaacngnnntagtcatctgtcattccggaaatagttcagatagttcaggataccatgaagcatcagttttaagtgacaactgcaacacgtcgttgccacgaaggccaaaatcgg

SEQ ID NO: 457 - DNA, 519 bp, Diabrotica virgifera
  misc_feature (1)..(519): RNAi target sequence
cctcgttggtggagtagtcaattcagcattgtacaatgttgatggaggtcacagggcagttattttcgacaggttcgccggtattaagaaacaagttataggcgaaggtacacatttctttataccttgggtacagaaacctattatctttgatgtacggtctcgccctagaaatatcccggtaataacaggtagcaaagatctgcaaaacgtaaatatcacactccgtattctcttcagaccagttccagacgaattaccaaagatctacacaattttaggccaggattatgaagaaagagttttaccatcaatcactaatgaagtcctaaaagctgtggtggcacaattcgatgccagtgaactgattactcagagagatgtagtttcccaaaaagtcagtgaagatttaactgaaagagctactcaatttggtgttatccttgatgatatatcattaacccacttaacctttggtagggaattcacacaagctgtagaattgaaacaagttgccca

SEQ ID NO: 458 - DNA, 22 bp, Artificial Sequence
  primer
  misc_feature (1)..(22): forward primer
cctcgttggtggagtagtcaat

SEQ ID NO: 459 - DNA, 22 bp, Artificial Sequence
  primer
  misc_feature (1)..(22): reverse primer
tgggcaacttgtttcaattcta

SEQ ID NO: 460 - DNA, 1170 bp, Diabrotica virgifera
  misc_feature (1)..(1170): WCRW transcript ta06694.001_diavv
cacaaatctaaatcggcattttgatcatcaattttgtggttttttattataaattcagctgttaggttgaaaaatatttcagtctaaaaattacgttataaaagacatcgaaatcttcgatcgattataaccataaaagcattttagtttgtttgcatttttacataacttaacctctcatagtgaacttcacatgtaaagatgtctgcagctcaaattttcaacagaatcggccaagttggtctaggaatagccctcgttggtggagtagtcaattcagcattgtacaatgttgatggaggtcacagggcagttattttcgacaggttcgccggtattaagaaacaagttataggcgaaggtacacatttctttataccttgggtacagaaacctattatctttgatgtacggtctcgccctagaaatatcccagtaataacaggtagcaaagatctgcaaaacgtaaatatcacactccgtattctcttcagaccagttccagacgaattaccaaagatctacacaattttaggccaggattatgaagaaagagttttaccatcaatcactaatgaagtcctaaaagctgtggtggcacaattcgatgccagtgaactgattactcagagagatgtagtttcccaaaaagtcagtgaagatttaactgaaagagctactcaatttggtgttatccttgatgatatatcattaacccacttaacctttggtagggaattcacacaagctgtagaattgaaacaagttgcccaacaggaagctgagaaagctaggtttttggtagaaaaagctgaacagacaaagaaagcaactgtaatctcagcggagggtgatgcccaagctgctgtgcttcttgccaaggcttttggtgatgctggagaaggtttagtagaactgagacgtatagaagcagctgaagatatcgcataccaactatcaaggtcaaggcaggtttcctacttgcctggaggacaaaatttgttgttgaatgtgccaacacctggtaattagatggatagagtaacaaacaaaattggagctagttgattatttggctctatgaatgagagagttgcccatttagcttttatggttctattattttttataaaagtatgttaataaattgttgataaattttaaaaaaaa

SEQ ID NO: 461 - DNA, 602 bp, Diabrotica virgifera
  misc_feature (1)..(602): RNAi target sequence
gggaagactcccaagatatggtcgacgagtccacagatcacgtttccagaacgaacgaaaaatcgacgatattcgaccaggttaaacagtttttaaagaataaccatcaaattcctggcatggcagatttagaagctaagcaagaagaagttttaaaacagcttgcagacctcaagaaacaaattctctcaattaaattggatttgaaaattaatgcaaactcagtaggaacaaacaagacctgtccaagtatttcagcagaaaagctgaatgctcttcctgatcttgttgtgaatgcaagtccaacaaatccgccatattcattactgataattcaaaagctactacgtgacattgtcgaattgaaggttacatcccatatacactcctcagttccaacattgaatgaaaatgccaaacagctgggtgactcattggcaagttacgtaccgaaacgtggtgtaccaagtgttaacattaaattgatatggaaaaatgtgggcatcgacacagaactcatagtatcacacgttccaatttttggagaagtcaacttattacggtatctaaccagggtaatcagttccccactcagatacagt

SEQ ID NO: 462 - DNA, 20 bp, Artificial Sequence
  primer
  misc_feature (1)..(20): forward primer
gaagactcccaagatatggt

SEQ ID NO: 463 - DNA, 23 bp, Artificial Sequence
  primer
  misc_feature (1)..(23): reverse primer
actgtatctgagtggggaactga

SEQ ID NO: 464 - DNA, 1170 bp, Diabrotica virgifera
  misc_feature (1)..(1170): WCRW transcript ta07588.001_diavv
taattatgtaattaggctgagtaaatatgaagttttgcctcttttaaggataacatacaatatcatctggacccctttttaagaacgccagtgaaaaattatttagcagacgaagactgattaccaaaaaaattatatatcgaatttctaaagttaattgtaacattttagcgaagaaaaatgaatgggccgataaaaatgtatcgaacacgacaaataattcaccacgaccaaaagattgacaagccgaagtgtatgtatgctttaaaaaatatctactcaaaagactcccaagatatggtcgacgagtccacagatcacgtttccagaacgaacgaaaaatcgacgatattcgaccaggttaaacagtttttaaagaataaccatcaaattcctggcatggcagatttagaagctaagcaagaagaagttttaaaacagcttgcagacctcaagaaacaaattctctcaattaaattggatttgaaaattaatgcaaactcagtaggaacaaacaagacctgtccaagtatttcagcagaaaagctgaatgctcttcctgatcttgttgtgaatgcaagtccaacaaatccgccatattcattactgataattcaaaagctactacatgacattgtcgaattgaaggttacatcccatatacactcctcagttccaacattgaatgaaaatgccaaacagctgggtgactcattggcaagttacgtaccgaaacgtggtgtaccaagtgttaacattaaattgatatggaaaaatgtgggcatcgacacagaactcatagtatcacacgttccaatttttggagaagtcaacttattacggtatctaaccagggtaatcagttccccactcagatacagttctgactctgatagtgtagaaatcgattcgatattagacacttgttatcttcttctgagagctaaaacgaaaactgaaaaggcaggacatattgccacattaaataaatccttaggaaaatcccaatggttagcaggtagaagtaggcatagtctgggggatctagccgcatactctgcccttaaacaggttacaagtggtagtgaaattaatgcaaatatgacgaagtggtatcagcggtgtgaaactgttgtataaaattatttttgttataaatataagctttaa

SEQ ID NO: 465 - DNA, 508 bp, Diabrotica virgifera
  misc_feature (1)..(508): RNAi target sequence
caaaacgaatgtgttgagtgtgtttttgtggatatggttctggttaataaggcgcttgatttatctcatagataacataatttttgttaaaactggtataactgctgattattattattctctttgtcaacaagagtgttacgtatagtgttatgtatagaacattcacgaagggttgcttcagcttccggtcagaccatgcccgtcttacccacgacccacgatgaggtagcaagacatgatttcgacaccgtcaccatcgattcatatggaatgagccccttggccttgcagaaaattagggagcagatggctttgagcctggagcgaaccaagcagttggaggaccagatcaagagcatgcacaaattggaggaggaggtcaacttcctgaaggatgaaaattgtaggttacgaaacagtttgaaatcagaaaacggaaaaaaccaagccacaataaatgacaattatatcgaacattacaaacgacagaggtctcaatcattca

SEQ ID NO: 466 - DNA, 22 bp, Artificial Sequence
  primer
  misc_feature (1)..(22): forward primer
caaaacgaatgtgttgagtgtg

SEQ ID NO: 467 - DNA, 22 bp, Artificial Sequence
  primer
  misc_feature (1)..(22): reverse primer
tgaatgattgagacctctgtcg

SEQ ID NO: 468 - DNA, 3569 bp, Diabrotica virgifera
  misc_feature (1)..(3569): WCRW transcript ta01520.001_diavv
ggggaactgtgttttgttcaacaaaaaataagtacctgtcacaaagtacatatatggagaacataaacaaaacgaatgtgttgagtgtgtttttgtggatatggttctggttaataaggcgcttgatttatctcatagataacataatttttgttaaaactggtataactgctgattattattattctctttgtcaacaagagtgttacgtatagtgttatgtatagaacattcacgaagggttgcttcagcttccggtcagaccatgcccgtcttacccacgacccacgatgaggtagcaagacatgatttcgacaccgtcaccatcgattcatatggaatgagccccttggccttgcagaaaattagggagcagatggctttgagcctggagcgaaccaagcagttggaggaccagatcaagagcatgcacaaattggaggaggaggtcaacttcctgaaggatgaaaattgtaggttacgaaacagtttgaaatcagaaaacggaaaaaaccaagccacaataaatgacaattatatcgaacattacaaacgacagaggtctcaatcattcacaaacgtaaacaatttggagatctcaatgcgaaaagaatcatccccaccacctccaccaccacgaaaagattttggagtgatgtgtggggtgttgacgaggaacataggagtaggcaatcagacacctaacacaaagaatgtttctacggctacttttgaaaatgaattcgctgataagtggctgccagaaaaggtcaaatttcttaacaatcagaacttgaagtcatctagtaaaatcacgatatcaaaagaaacgcaaaccctaggacaaaagtcaagctcagataaaggtgtccaattccaaacaaagagtcctacagtgcctaagttcagcacctacacgcaaactacaacaactaaaaaacaactagtggataaagggatcttagcaactgtcaaagtatctcatatttctgtccagaaatgtgttgaatgttactctattggcacttcagatgacacagtaaatgatatcatttgcgaaaaatgcaatgctacaaaaaagatctatagcaataggtcctgaatctaatgaagatagccatacgtcgcctatatccttagcgtcccttaacttaagaagcaaatcgttcaatatgggcgaagatcgacttaaccttaccactagaacccgttccatagcatcacagtacgaatctagtagcatcagcagagcttgtcaggcgaaacttaagaaggattcttctacgaaatcttgccaagctgaaacgaaaatgactgacaaaaacacccagtacgtaaattacactgtctcaaggcataccgacactcaagactttataacaccaaagaaaaacgtcagttgcgaagcagttgaacaaaaaccggaaaccattgaggtggcttgtaataccgcgactgatttgctgacctgcgtcaaatgtgaaaaagaaaaagaaaaggaggcgctgaagaaagacggaggcagccccactccatctagaataccgcgaccacaaattccgactactcccgtagaaaatagaaagtttaggagacaagatacttatactaaagtatattcaccaactgagaaagctacatcacctactagtccaagattgtctggtttagatctatcacctaaagtcatatcaaacgattcaaatcccttagataaagttaaaagtaacctcaaactagtagaaccaataccacatgctcaaaatggtgtcaatttcacagcgcctattaccaaagttcaaattcaagaaattacactgccaacttcagaatctgttttccaacccattacacaaaatcaaaataggaaaaaagtcatgccaagtaaggaaatgcagggtgcaatgaaagtcctgaacgatcatcttatgaagaacccttccaaaaacatcaagaacccaactgctgaaaatattattcaaacagaatggttcaaaatctcgagctcagtaacagccaatccattggaagtggaggattacctggatgctttcgaagacgtgtccagcttgttactggaatacatagtaaacatgagtgattatagtgggaacacagccatgcactatgctgtttcccatggcaactttgatgtcgtatccattttgttagattctaaagtttgtgatatcaataaacaaaataaggctggatatacaagtgttatgttagtttctttggcggaagttcggtcccaaacacatgccaacgttgtccgaagactgttccagttagctgatgtgaatattagagcgaaagagcatggtcaaacagcactgatgttagcagtaagccacaataggttgaacatggtcaagatgttgttggaagcaggtgcagatataaatattcaggacgaagatggcagtacggcgttaatgtgtggtgctgaacacggccatatcgaaatagttaaacatttcctttcccaacctgactgcaattcgaccattatggatatggatggcagcacagctctagcaatagctatggaagccggtcaccgacacatcggagtcctgctctacgctcatgagaggaatagccaaaagtctcataacgtgaagttaaaaaaagcaaaatcaacaaatagtccgaaaaccccttcctcaccactggctgcaagaagtagccatcgtgccttaacagatacgaaacctaaatagtactaacccatttctaactgtgttttaacttaagaaggtaatgcgtgttgtttcgctgttaacgattctgttaaccatcgtgatgtattcatatacgatggttctagatttttggcatgtaaaatgcatgtttattcagtgtcatcaagatagggaacccaaagttattcatccggtccaaacaactctatctagatgaacatattcttatgtataatggaaaagaatcttagtcgatatatggcctggcgcaaatttgacccaaccgagacacaatacactccggggccacggatgacccttgcatttatttttctactgcagcgcatattgaacccaaccgtgggctgtcgccgtggccagttgctaaaatgtagtgatgttgattatagttattttcaagtatctatgtattcgttacttttgtgtaaagtaataatttacattattcgttacattgattactatgaatacttcgaatatttatgtatttcactaacagtaatcatatagaaaatcggaattcctcagtattttgaatataccttacaatattgtaacacaagtgagcgcttccaacaaatttaaacatattttaagtgatatgcgttactattgataatacaaaaataaaaaccgtgaatacataaaaacaatacaatatataataaaacaatgaaatacataaaaacaatgaaatacatgtaaaattaaagttgttgattatagtgtagatacattatcatttccacatatttttagtcaatctaaagctattttttatctaagactaataatatacaaccgcgtaaccaggatgatcctaagggggggggggttacg

SEQ ID NO: 469 - DNA, 525 bp, Diabrotica virgifera
  misc_feature (1)..(525): RNAi target sequence
gggaaccatctgataccattgagaatgtcaaagctaagatccaagataaggaaggtatcccaccagaccagcaaagattgatctttgcaggaaaacagctagaagatggtagaaccttgtctgactataacatccagaaagagtccactcttcacttggtactgagattgagaggaggtatgcagatcttcgtcaagacactaactggaaagactatcactttggaagtagaaccatctgatactattgagaatgtgaaagctaagatccaagataaggaaggtatcccaccagaccagcaaagattgatctttgcagggaaacagctagaagatggtagaaccttgtctgactataacatccagaaagagtccactcttcacttggtacttcgattgagaggaggtatgcagatcttcgtcaagacactaactggaaagactatcactttggaagtagaaccatctgataccattgagaatgtgaaagccaagatccaagataaggaaggtatcccaccagatc

SEQ ID NO: 470 - DNA, 20 bp, Artificial Sequence
  primer
  misc_feature (1)..(20): forward primer
gaaccatctgataccattga

SEQ ID NO: 471 - DNA, 22 bp, Artificial Sequence
  primer
  misc_feature (1)..(22): reverse primer
gatctggtgggataccttcctt

SEQ ID NO: 472 - DNA, 703 bp, Diabrotica virgifera
  misc_feature (1)..(703): WCRW transcript ta21603.001_diavv
gcacgaggcttggtacttagattgagaggaggtatgcagatttttgtcaagacattgactggtaaaactatcacattagaaggggaaccatctgataccattgagaatgtcaaagctaagatccaagataaggaaggtatcccaccagaccagcaaagattgatatttgcaggaaaacagctagaagatggtagaaccttgtctgactataacatccagaaagagtccactcttcacttggtactgagattgagaggaggtatgcagatcttcgtcaagacactaactggaaagaccatcaccttagaagtagaaccatcagataccattgagaatgtgaaagctaagatccaagataaggaaggtatcccaccagaccagcaaagattgatctttgcagggaaacagctagaagatggtagaaccttgtctgactataacatccagaaagagtccactcttcacttggtacttcgattgagaggaggtatgcagatcttcgtcaagacactaactggaaagactatcactttggaagtagaaccatctgataccattgagaatgtgaaagccaagatccaagataaggaaggtatcccaccagatcagcaaagattgatctttgcaggtaaacaattggaagatggaagaaccttatctgattataacatccagaaagagtccactcttcatttggtactta

SEQ ID NO: 473 - DNA, 653 bp, Diabrotica virgifera
  misc_feature (1)..(653): RNAi target sequence
  misc_feature (623)..(623): n can be any nucleotide
gatcagctaagaggctgacaccacgccattttgctttgagaacacgtttttggattttatatacagtaaattagtctattaatttatcaaaatgtctggagaagaaacatctgccgatagaaatgttgagatatggaaaataaagaaacttataaaaagtttggaactagcaagagggaatggaacaagtatgatctcacttataattcctccaaaagatcaaatatctagagtaagcaaaatgttagctgatgaatttggtacagcctctaatattaagtctcgagtaaatagactttcagttcttggtgctatcacatcagtccagcaccgtttaaaactatataccaaggtccctcctaatggattagtcatttactgtggaactattgtaactgatgaaggaaaggaaaagaaagtaaacatagactttgaaccattcaaaccaattaatacctcattgtatttatgtgacaataagttccatacagaagccctgacagcattattggcagatgataataaatttggttttatagttatggatggtaatggtgcattattcggtacactacaaggaaacacaagggaggtacttcacaagtttactgtagatttacccnagaaacacggtagaggaggtcagtctgcac

SEQ ID NO: 474 - DNA, 22 bp, Artificial Sequence
  primer
  misc_feature (1)..(22): forward primer
gatcagctaagaggctgacacc

SEQ ID NO: 475 - DNA, 22 bp, Artificial Sequence
  primer
  misc_feature (1)..(22): reverse primer
gtgcagactgacctcctctacc

SEQ ID NO: 476 - DNA, 2829 bp, Diabrotica virgifera
  misc_feature (1)..(2829): WCRW transcript ta00933.001_diavv
aaacaatttagggtggatttgaaattaaatttaatcaaaatttggtggacaaaataaaatcccaattttcaaatttttgttttttatgacagatatctgaactgaattatcaattggatatgccaaatcacctaaacagaatattgttctttacctgaatttacagttaaggccgtgaatatccagttaaaaccagttggtttcagttaataactagtgaaaagtgactttcctggatcctcttgttgatcagctaagaggctgacaccacgccattttgctttgagaacacgtttttggattttatatacagtaaattagtctattaatttatcaaaatgtctggagaagaaacatctgccgatagaaatgttgagatatggaaaataaagaaacttataaaaagtttggaactagcaagagggaatggaacaagtatgatctcacttataattcctccaaaagatcaaatatctagagtaagcaaaatgttagctgatgaatttggtacagcctctaatattaagtctcgagtaaatagactttcagttcttggtgctatcacatcagtccagcaccgtttaaaactatataccaaggtccctcctaatggattagtcatttactgtggaactattgtaactgatgaaggaaaggaaaagaaagtaaacatagactttgaaccattcaaaccaattaatacctcattgtatttatgtgacaataagttccatacagaagccctgacagcattattggcagatgataataaatttggttttatagttatggatggtaatggtgcattattcggtacactacaaggaaacacaagggaggtacttcacaagtttactgtagatttacccaagaaacacggtagaggaggtcagtctgcacttcgttttgcccgtctgagaatggaaaaacgtcataactatgttcgaaaagtagcagaagtagctacgcaattatttataacaaatgacaaacctaacatagctggactcatcttggcgggtagtgccgattttaagactgaacttagtcaatctgatatgtttgatccaaggttacaagctaaagtaatcaaactagtagatgtctcgtatggtggtgagaatggatttaatcaagccatcgaattagcagctgaatcacttcaaaatgtaaagtttattcaagaaaagaaactgataggcagatatttcgatgaaattagccaagatacggggaaatactgttttggagttgaagatactcttaggggcttggaattaggtgctgtagaaacactaatctgttgggagaatttagatattcagcgatatgtattgaaaaaccatgctacaggttcggaaactatactgcatttaactcctgaacaagaaaaagataaatcacatttttcggataaagagactggtgtagaattggaattggtcgagtgtcaacctcttcttgaatggttggcgaataattacaagaacttcggtgccactttagaaattattacagacaaatctcaagagggctcccaatttgttcgagggtttggtggaattggaggtttgctccggtacaaagtagacttccaaagtttacaactagacgatatggataacggcgaagaatttgatctagatgattattaaatgtagagacaaatttgtagaaattttcatttaaaacaatgtgggcccgttatgtaataaacacgtgtaaaaagtaaatgatggcaatatactaatttatcctaaaggagtataatatgatgtgcttttttgtaatattatttccaaatttatgctttcacaaacttgaaagtttattccatgaaaagttttaattatatcattaaattaataagtattattgattaattttatttattgattaatctatgttagtaaaatgtacaaagcacaaagataaagatagttaggataaccctttacaccaactgaaagtatagaaatttccggattgtttggtacggcaacaaacaaattcacacgaaattccaaatttgataatgtctactacagttgaagatgacaatagataattccagaccacgacctatacgctcagaaaacaatgtaccattacaaaacggctgcgaaagcctacattcatacttgattcgtatacatactgtccatgggcgctcatacccatgggcagggtagggggcgtggccccctggcttttcgggtgctttaaactatatgtcgttatccaaagtatacatacctaaggtaatgtgcaacatcttcacgtctgccctccccctaaaaatttttatatgggcgcccgtgatactgtcctaagttacacatccatttttgtccacgtgtgtgaccaggagcgccattaccaacggttcccaagactgagagtcatagcttactcggagcagtagggatttaaagaagaaaaaacgagctatgtacttgtcagtgtgtcggatcacacacagatcggtttagtagtttgtataaattatataaaataaaaatgtagatttggaaataatattacaataatatcggagtgatcatgtgttttgtataaattatattgtctcaaaaaatgtttaccgatatttattatttaattgttaaaattatgtatgtatattgcaagtgtttataattaatagtgaaaaagaccagtatttctacagtggcttgtttttttcattggtttttatatatttagaacagaatattttttgtatttactttttttgttaacgaggtaataaatcaggtttggaaattcttcattctattttagtttgtaaccattggcatttttgttttt

SEQ ID NO: 477 - DNA, 577 bp, Diabrotica virgifera
  misc_feature (1)..(577): RNAi target sequence
ctgactctgttcattggggagtggttgaaaggggtgttttttggagttattccattatttgaaggagtgataaagaagatcttggaagccaccatagacttaattcacatagaaccagcatactttctgatcaccaagaagaaatgactgagtattggttgatatctgccccaggggataagacctgtcaacagacatgggacacgatgaataatatgacaagtaaacagaataatttgtcaaccaactacaagtttcaaatcccggacttgaaagttggtactctggatcagttagtaggactttctgatgatctgggcaagcttgatgggttcgtggagcaggttaccaggaaggtagctcagtaccttggagaagtacttgaagaacagagggacaagtggtcagaaaacctgcaggccaataacagcgatttgcccacttatttaacccgatttacttgggacatcgccaaatatcccatcaagcaatcgctccgtaacatcgccgatataatcagcaaacaagttggccaaattgacgctgatctgaagaccaaatcgtctgcgtacaataa

SEQ ID NO: 478 - DNA, 22 bp, Artificial Sequence
  primer
  misc_feature (1)..(22): forward primer
ctgactctgttcattggggagt

SEQ ID NO: 479 - DNA, 22 bp, Artificial Sequence
  primer
  misc_feature (1)..(22): reverse primer
ttattgtacgcagacgatttgg

SEQ ID NO: 480 - DNA, 2409 bp, Diabrotica virgifera
  misc_feature (1)..(2409): WCRW transcript ta01215.004_diavv
ggtgaaacttcaataacgatcagctgggctgactctgttcattggggagtggttgaaaggggtgttttttggagttattccattatttgaaggagtgataaagaagatcttggaagccaccatagacttaattcacatagaaccagcatactttctgatcaccaagaagaaatgactgagtattggttgatatctgccccaggggataagacctgtcaacagacatgggacacgatgaataatatgacaagtaaacagaataatttgtcaaccaactacaagtttcaaatcccggacttgaaagttggtactctggatcagttagtaggactttctgatgatctgggcaagcttgatgggttcgtggagcaggttaccaggaaggtagctcagtaccttggagaagtacttgaagaacagagggacaagtggtcagaaaacctgcaggccaataacagcgatttgcccacttatttaacccgatttacttgggacatcgccaaatatcccatcaagcaatcgctccgtaacatcgccgatataatcagcaaacaagttggccaaattgacgctgatctgaagaccaaatcgtctgcgtacaataacttgaaaggaagtcttcagaatttggagaagaaacagacaggaagtttactaacaagaaacttggcagatttggtgaaaaaggaacattttattttggattctgaatatttgcagacattgttggttattgttccaaaagcccaattcaacgaatggaatgcgacatacgaaaagattaccgacatgatagtccctcgttcttcacaactgattaaacaggataacgaatacggtctatatactgtatccctattcaaaaaggtcgtcgaagaattcaagttacacgctagagaaaagaagttcatcgttcgtgatttcatatataacgaagaggaactggcagctggaaagaacgagataaccaaactcgtcaccgataaaaagaagcaatttggtccattagttagatggcttaaagtcaacttcagcgagtgtttctgcgcctggattcacgttaaagcgttgagggtatttgttgaatctgttttaagatatggcctccccgtcaatttccaagctattttaatccaccccaataagaaacaattaaaacgtttaagagatgtcttgaaccaactttacggccacctcgatagtagtgctgccctttcaggacctaacgttgatagcgttgacattccaggcctcggattcggccaatcagagtattacccatacgtttactacaagctgaacgtcgacatgttagaatcgaagatctaaactcacgcatcaatccaagagtttgttattaataggttccaaacaattttaaaaaaacgtactacagatacaaatagtatatttttgattactcactctttcgaggggctgttttaatgtcggtatttttaagttttgtccttactcaatgtccatttagtaccccgtcattgtatgtaaattaattaaaaatgcgcaacaaaaaatgtagaacttttttttattttaaaatgcatttaaaattcgtttaacgatgatataattgctttaatgtatcatgtaatactccgattgaacatataaatcgttattaatattatttcttgttgataatacaaaagagaccatattattagaaactgcattcgaaaaattaaaaaaatgatagatattatgacgcgtagatgagctgacaagtgacgtgttaagatgtattgatatctaaacatgaaatttcaacaaaccatctatgttatagatgtacatatgtttcgtaaaattgacgaaaagctggaaatagattacatataatttgtcataaaatatttgcgtcagagacttgaggttgtgatacaatatatatttactcctacagaatatttgttgaatattaccgacaccattaaaataccttatccgttatgattgtagataaataatttactctgaatttaatacaaaacgatgtcataatttcaattgtacttgttctaataatataactacttatcgaaaaagaatagaaatttattataaaattgtgtgaaatgactgggtattataggattgccccaacaaaatattttagatgtagtatgatgcttcatcagtgacaatatatttgacgtgttttattatgggccactctttaatgtaaaccagtattgatttattgtaaataaatattgtatatatactacaaaccaataaaatattttgccttttgaatctatttataaaagatgattccatattgtaatatagttcaattagttgactactttttttgaatttatttcagaaataattttaagtggttatttgttcaatgtaattgttagaaaataaaaactattccaa

SEQ ID NO: 481 - DNA, 689 bp, Diabrotica virgifera
  misc_feature (1)..(689): RNAi target sequence
  misc_feature (338)..(338): n can be any nucleotide
  misc_feature (551)..(551): n can be any nucleotide
gggcttctttctgtggttaagtccaaaatggcaccgacagctgacaaaactaaaacggttaaagggctccccgcagtcccagaatcagtcttaaaacaccgtaaaagacgtgaagcatcccgtgctaaacaactccagtctgtcatcaaaaagaaggcagaacagatcaaaaagaggaaagatattttcaaaagagctgaacagtatgttaaggaataccgtttaaaagaaagagacgaagttaggctagttagacaagccaaaaccagaggaaatttctatgttcctgctgaggctaaattggcttttgttgttcgtattaagggtatcaataaagnagcacctaaagtacgcaaagtactccaactattccggttacttcaaatcaacaatggagttttcgttaagttgaacaaggctactattaacatgcttaggatatgcgaaccttacattacatggggatatcctaacttaaagtcagtaagagaattaatctacaaaagaggatttgccaaagttaatggacagcgtgtagcaattaccagcantcaaatcgttgaagacaggttggggaaaatctggaatcatttgtgttgaagatttaatccacgaaattttcactgttggacctaagttcaaatatgcctccaacttcttgtggcccttcaagctaaacacacccactg

SEQ ID NO: 482 - DNA, 20 bp, Artificial Sequence
  primer
  misc_feature (1)..(20): forward primer
gcttctttctgtggttaagt

SEQ ID NO: 483 - DNA, 22 bp, Artificial Sequence
  primer
  misc_feature (1)..(22): reverse primer
cagtgggtgtgtttagcttgaa

SEQ ID NO: 484 - DNA, 855 bp, Diabrotica virgifera
  misc_feature (1)..(855): WCRW transcript ta05864.001_diavv
ggggggcgtgtggggggtctttctgtggttaagtccaaaatggcaccgacagctgacaaaactaaaacggttaaagggctccccgcagtcccagaatcagtcttaaaacaccgtaaaagacgtgaagcatcccgtgctaaacaactccagtctgtcatcaaaaagaaggcagaacagatcaaaaagaggaaagatattttcaaaagagctgaacagtatgttaaggaataccgtttaaaagaaagagacgaagttaggctagttagacaagccaaaaccagaggaaatttctatgttcctgctgaggctaaattggcttttgttgttcgtattaagggtatcaataaagtagcacctaaagtacgcaaagtactccaactattccggttacttcaaatcaacaatggagttttcgttaagttgaacaaggctactattaacatgcttaggatatgcgaaccttacattacatggggatatcctaacttaaagtcagtaagagaattaatctacaaaagaggatttgccaaagttaatggacagcgtgtagcaattaccagcaatcaaatcgttgaagacaggttgggaaaatctggaatcatttgtgttgaagatttaatccacgaaattttcactgttggacctaagttcaaatatgcctccaacttcttgtggcccttcaagctaaacacacccactggtggatggcgtaagaagactaaccactatgttgaaggaggtgactttggtaatagagaagatagaattaatgaacttctcagaaggatggtttaaaccaatttgtttataaaataaattatgtataaaacacaaaaaaaaaaaaaaaaaatgcga

SEQ ID NO: 485 - DNA, 327 bp, Diabrotica virgifera
  misc_feature (1)..(327): RNAi target sequence
acacttacacccttcaaaaactcatttataaactaaaaatgggtgcatctgtaattcctttcatagttttcactgtattatggggaggagttggagctgttctacccatttttgtacctaaaggacccaatagaggaattatccaagttattcttatgataacaggtgtgtcgtgctggttgttctggctgtgttgttacgtagctcaaatgaatcctctgatcggtcctaaactagaacaaaacatcgtgctgattatggcaaaacaatggaaatatgcattaccatcgtcagcttgaatgaaggtgtgagtgaccattccatctg

SEQ ID NO: 486 - DNA, 24 bp, Artificial Sequence
  primer
  misc_feature (1)..(24): forward primer
acacttacacccttcaaaaactca

SEQ ID NO: 487 - DNA, 22 bp, Artificial Sequence
  primer
  misc_feature (1)..(22): reverse primer
cagatggaatggtcactcacac

SEQ ID NO: 488 - DNA, 656 bp, Diabrotica virgifera
  misc_feature (1)..(656): WCRW transcript ta06727.001_diavv
ttcaaggagtggttagattgtatgcactgaatttctgaaggcagatgattttgacagattttagtttactctacttgtaaagtgaaaatctattcacgtgaattattttacacttacacccttcaaaaactcatttataaactaaaaatgggtgcatctgtaattcctttcatagttttcactgtattatggggaggagttggagctgttctacccatttttgtacctaaaggacccaatagaggaattatccaagttattcttatgataacaggtgtgtcgtgctggttgttctggctgtgttgttacgtagctcaaatgaatcctctgatcggtcctaaactagaacaaaacatcgtgctgattatggcaaaacaatggaaatatgcattaccatcgtcagcttgaatgaaggtgtgagtgaccattccatctggatagtgtgtagaaatttcaaattgcacagctattgcattgtattatatttattattaatttcctttttgtgatcatccaatatctgtatgtagtatgttttaaagtgatgtgtataatattgattattgtttatatactatcatcaaaaccaaccattaattgtaaaaaaaatattgttgaattaaattaatttgtcagttaaaaaaaaaaaaaaaaaa

SEQ ID NO: 489 - DNA, 526 bp, Diabrotica virgifera
  misc_feature (1)..(526): RNAi target sequence
tgtatttgtgactggaaaaggaaattagagccctatacttacagttaaacgcttataaatttgtagcaagtattttatctttacaaaagaaagtttatttcttaacattgtagttttatatttttattacaaatggcaactggaactactttgcaaaaagccattgagttagtcaccaaagccaccgaagaagacagaaacaagaattatgaagaagcccttcgtctatatgaacatggagtagagtactttctacatgccattaaatatgaagctcagggtgacaaagctaaggagagcattagggccaaatgtgtacagtatctagaaagggcagaaaaaattaaagaatctgtaaggaaagggaagaagaagccagttttagatggaggttcttcaaaggaagacaaaaagagtgatagtgatgaaggtgacgaagatgatcctgacaaaaagaagttacaaagcaaactggaaggggccatagttgtagaaaaaccacatgtcaaatggagtgatgtggcag

SEQ ID NO: 490 - DNA, 24 bp, Artificial Sequence
  primer
  misc_feature (1)..(24): forward primer
tgtatttgtgactggaaaaggaaa

SEQ ID NO: 491 - DNA, 20 bp, Artificial Sequence
  primer
  misc_feature (1)..(20): reverse primer
ctgccacatcactccatttg

SEQ ID NO: 492 - DNA, 2068 bp, Diabrotica virgifera
  misc_feature (1)..(2068): WCRW transcript ta02217.001_diavv
tgtgaagtgtcaaaactgtcaaaagaattatgccaatgtcaaaagtgtaatttggaggggtgattataaaattattcttagacattacaatatttcatataaagtatttatttaaaagatgtatttgtgactggaaaaggaaattagagccctatacttacagttaaacgcttataaatttgtagcaagtattttatctttacaaaagaaagtttatttcttaacattgtagttttatatttttattacaaatggcaactggaactactttgcaaaaagccattgagttagtcaccaaagccaccgaagaagacagaaacaagaattatgaagaagcccttcgtctatatgaacatggagtagagtactttctacatgccattaaatatgaagctcagggtgacaaagctaaggagagcattagggccaaatgtgtacagtatctagaaagggcagaaaaaattaaagaatctgtaaggaaagggaagaagaagccagttttagatggaggttcttcaaaggaagacaaaaagagtgatagtgatgaaggtgacgaagatgatcctgacaaaaagaagttacaaagcaaactggaaggggccatagttgtagaaaaaccacatgtcaaatggagtgatgtggcagggctggaagctgccaaggaggctttgaaagaagctgttatattacctattaggtttccccatttgttcagtggaaagagagtaccttggaaagggattttgttatttgggcctcccggtactggtaaatcgtacttagccaaggctgtagctacagaagcaaacaattcaacatttttttctgtttcgtcgtccgatctcgtttccaaatggttgggagagtcagaaaaattagtcaagaatcttttcgaattggctagagcccacaaacctagtattatattcattgatgaaatcgattctttatgctcatcccgttccgacaacgaatcagagtcagccaggagaatcaaaaccgagtttttggttcagatgcaaggtgtgggccacgatactgaaggtatccttgtcctcggtgctacgaatattccgtgggtattggattctgctattcgaagaagatttgagaagagaatttacatacctctaccagaagaacctgccagagccgttatgtttaaattgcatttaggaaatactcatacagagctaacagatgaagatattaaagagttggcatctaaaaccgaagggtattccggagctgatataagtatcgtagttcgtgacgctcttatgcaacccgtccgaaaagtccaaactgcaactcacttcaagaaggtcagaggtccgtcgccgcttgatcctaataccatcgtagatgatttgttgcttccatgttctcccggagatccgggagctgtggaaatgtcttggatggatatctccagtgataaattagctgagcctcctgttacagtgaatgacatgctgagatcaatcgcaacctccaaaccaaccgtcaacgacgaagatctcacgaaactcaaaaagtttatggaagacttcggccaagaaggataaaatttaggtatacaccagatttactatttaaaagagagattcttgtataatatttgtattcttttaatgcatatatagatcgtaaaaaccacacaaaactttcaacattttgcattaagtgttattagaaaacaaaagattaatgttgttatactgttgctttaatattatttttttaataaattgaatttttcttttttatattacggccttattatacagtaagatagtatatatttgtattcttaatgataaatgaagttaatgaaacatgtttttagaatattcacttgttctttgtatataaaataataaaacaccgattggtttaaaatacttgtattggcttaaagcaagttatctataagcttcaaagacatactcagtgtcttatccgatttctgttactataaacgatctgattcatttatttatctgttgtaattaaaatctgaaataaaatgtcacaatatgtagattgttttccaccttaggattgg

SEQ ID NO: 493 - DNA, 621 bp, Diabrotica virgifera
  misc_feature (1)..(621): RNAi target sequence
gcgattcggtaaaggagaaagtaaccagaattattttagctgttttcaggaatttgatcgaaaaacccgaagatcaacaagtttcaaaagaacattgtatagctatggtgcaatgcaaagtattgaaacaattggccattttagaacagcgcaagttcgatgatgaagatgtgacagctgatgtcgaatttctaactgaaaaactacagagttctgttcaggatctgagttccttcgatgaatattcaactgaagtcaaatctggacgtttggaatggtctccagtacacaagagcaagttctggcgggaaaatgcgcagcgcctcaacgagaaaaactacgaattactccgtattctcattcatttgttagaaaccagcaaggaccccttggtattgagcgtagctagtttcgatattggagagtatgttcgccattatcctcgcggcaaacacataatcgagcagttgggaggaaagcaattagttatgcaactcttagcccacgaagatcccaatgtacgatatgaagctctgttggcagtccaaaaattgatggtccacaattgggaataccttggtcgtcaacttgaaaaagagcaaagtacagataaaaccgcgc

SEQ ID NO: 494 - DNA, 21 bp, Artificial Sequence
  primer
  misc_feature (1)..(21): forward primer
gcgattcggtaaaggagaaag

SEQ ID NO: 495 - DNA, 22 bp, Artificial Sequence
  primer
  misc_feature (1)..(22): reverse primer
gcgcggttttatctgtactttg

SEQ ID NO: 496 - DNA, 1830 bp, Diabrotica virgifera
  misc_feature (1)..(1830): WCRW transcript ta02168.002_diavv
tacttctgtcagtgtcaaaatttatatcacaagacttccagttgggagttgggtcagagttaattttttaggtcttctattaaaagggttgtaattttaatttaaaaaaatggcatccaatttagttgcgggagcaaatcctaaaatacaggatataatgtcgtctttggacgatgacaaaacagatatgttggctgctacaagtgtattgcagcaaagagctacagatataagaaatcaacatgtaaactggcaatcctatttccagtcacaaatgatttcgcaggaagactacaacttcatagtagcttttgatgtgactgatagtgcaaaaagagaagctctcctgaaaagcgacagaaaccaatgtgctcaaacattgttgaaccttttggggcatgtatccaaggaccaaactctgcagtacattttagttttggttgatgatatgttacaggagaacagaagtcgtgtagagatatttcacgaatatgccaaccaaaagaaagaatctgtttggggtccatttttgaaccttcttaaccgccaggatggatttattaccaacatgacttctaggatcatcgctaaaattgcttgttggtcgcagacacttatggatcgttctgaccttcatttttacttgacctggttaaaagaccaactaaaaactcagaacaacgaatacatccaatcggttgcaagatgccttcaaatgatgctccgaattgacgactaccgttttgccttcgtgtccgtcgatggaatatccactctgttgtcggtactctctggaagagtaaatttccaagttcagtaccagctgatattctgcttgtgggtactcactttcaacccgttgttagccgaaaagatgaacaaattcaacgttattcctatattggcagatattttgagcgattcggtaaaggagaaagtaaccagaattattttagctgttttcaggaatttgatcgaaaaacccgaagatcaacaagtttcaaaagaacattgtatagctatggtgcaatgcaaagtattgaaacaattggccattttagaacagcgcaagttcgatgatgaagatgtgacagctgatgtcgaatttctaactgaaaaactacagagttctgttcaggatctgagttccttcgatgaatattcaactgaagtcaaatctggacgtttggaatggtctccagtacacaagagcaagttctggcgggaaaatgcgcagcgcctcaacgagaaaaactacgaattactccgtattctcattcatttgttagaaaccagcaaggaccccttggtattgagcgtagctagtttcgatattggagagtatgttcgccattatcctcgcggcaaacacataatcgagcagttgggaggaaagcaattagttatgcaactcttagcccacgaagatcccaatgtacgatatgaagctctgttggcagtccaaaaattgatggtccacaattgggaataccttggtcgtcaacttgaaaaagagcaaagtacagataaaaacgcgccaaagggtggagctcctgtcgcaggcaaggcgtaaatactaccatgaaaagtatttaaagatatttactgcaataattgtagaaactttaaaaataattgtaaaaattatatcgatttctgtacatagctgtataggtatacattcctgtcatattttattattgttacgataaccaataatcaaccatgcacattttaaacatttaaaaatattgcttttaaagtaacttttttctgattgttagtattataataaagtatatgttgtcgtttaaaaaaaaaaaaaaaaaa

SEQ ID NO: 497 - DNA, 642 bp, Diabrotica virgifera
  misc_feature (1)..(642): RNAi target sequence
gggaacctttttctggaggttaggaaaagtacgtgacattttcactttattttccatacagtttaaacaatattgtattcttgtagttattgcctgaaaataatcactttttaagattagcaatgccagcagctgacgaaataaagtccagctgggctgacgaggtagagttagaaggaggtgccttaccaccacccagtgaagtcttcgaaaatggtttcaagattgtaactgaatataaatacaatgaagacgacaagaaagttaagattgtcaggacgtacaaaattgagaaacgtgctgtgtccaagtcaattgctctccgtaaaacatggaaaaagtttggtgatgttgccaatgataaacctggcccgaatcccgcgactaccatagtagctgaagacgtttatatgcagtacatcactagtaaggaagaagataataagcaggatgatgactctttggacaaactgaaaggaatgggtgataagaaattctttaaatgtcgtacatgtaatggtgaacattggactacaaaatgtccatggaaggacactatgtttgttggtggaaagccaccagatgataagaaaatatcagctgttggaggggcagctgttggtgaagctggtaaacaaggat

SEQ ID NO: 498 - DNA, 20 bp, Artificial Sequence
  primer
  misc_feature (1)..(20): forward primer
gaacctttttctggaggtta

SEQ ID NO: 499 - DNA, 22 bp, Artificial Sequence
  primer
  misc_feature (1)..(22): reverse primer
atccttgtttaccagcttcacc

SEQ ID NO: 500 - DNA, 1014 bp, Diabrotica virgifera
  misc_feature (1)..(1014): WCRW transcript ta06291.001_diavv
cggcaacctttttcttgaggttaggaaaagtacgtgacattttcactttattttccatacagtttaaacaatattgtattcttgtagttattgcctggaaataatcactttttaagattagcaatgccagcagctgacgaaataaagtccagctgggctgacgaggtagagttagaaggaggtgccttaccaccacccagtgaagtcttcgaaaatggtttcaagattgtaactgaatataaatacaatgaagacgacaagaaagttaagattgtcaggacgtacaaaattgagaaacgtgttgtgtccaagtcaattgctctccgtaaaacatggaaaaagtttggtgatgttgccaatgataaacctggcccgaatcccgcgactaccatagtagctgaagacgtttatatgcagtacatcactagtaaggaagaagataataagcaggatgatgactctttggacaaactgaaaggaatgggtgataagaaattctttaaatgtcgtacatgtaatggtgaacattggactacaaaatgtccatggaaggacactatgtttgttggtggaaagccaccagatgataagaaaatatcagctgttggaggtgcagctgttggtgaagctggtaaacaaggatccaaatatgtaccacctaatttgagagatggaggtgtgaagagaactgatggatctggtgtagctaaacgagatgatagttcctgtgctatcagaattgccaatttgagtgaatccacaactgaaactgatttggaagatctggttaaacaatttggaccaattcaaaaactgtatttggcgaaagacaagataactggtggatgtaaaggatttgcttatatacatttcaaattccgttctgatgcagctaaggcaatcgcaatgcttcatggacatggttatgatcatcttattcttaatgttgattggtccaagccatcaccaaattctaaccaataattgtatcaccagatttttgaataataaaat

SEQ ID NO: 501 - DNA, 524 bp, Diabrotica virgifera
  misc_feature (1)..(524): RNAi target sequence
tcaacgtcatctcagtttggtttattgttgggtgtaatgtttaaataaaataattattattttgtaaacctgtgccattaaacaaataaagcgatggtgctaattgcagcagcagtctgcacgaaagcaggcaaaacaattgtgtctcgacaatttgttgaaatgaccaaagctagaatagaaggtttgttggctgcctttcctaaattaattcctacaggaacccagcatacatttgtggaaacagattcagtacggtatgtttatcaacccctagagaaactgtatatggttcttattacagctagagctagcaacatattagaagatcttgaaaccctccgtctattcgcaagagtgattcctgagtactgcaaatctttggatgaaaatgaaattgcagagaatgcattttcacttatatttgcttttgatgaaatagtggcattaggttatagggaaagtgtcaatctgtctcaaattcgcacatttgtggaaatggactcgcacgaagaaaaagttta

SEQ ID NO: 502 - DNA, 22 bp, Artificial Sequence
  primer
  misc_feature (1)..(22): forward primer
tcaacgtcatctcagtttggtt

SEQ ID NO: 503 - DNA, 23 bp, Artificial Sequence
  primer
  misc_feature (1)..(23): reverse primer
taaactttttcttcgtgcgagtc

SEQ ID NO: 504 - DNA, 1812 bp, Diabrotica virgifera
  misc_feature (1)..(1812): WCRW transcript ta03896.001_diavv
cgaagatccttgtcacgtcactgctttttcgtgaagggggggtacacgtcaacgtcatctcagtttggtttattgttgggtgtaatgtttaaataaaataattattattttgtaaacctgtgccattaaacaaataaagcgatggtgctaattgcagcagcagtctgcacgaaagcaggcaaaacaattgtgtctcgacaatttgttgaaatgaccaaagctagaatagaaggtttgttggctgcctttcctaaattaattcctacaggaacccagcatacatttgtggaaacagattcagtacggtatgtttatcaacccctagagaaactgtatatggttcttattacaactagagctagcaacatattagaagatcttgaaaccctccgtctattcgcaagagtgattcctgagtactgcaaatctttggatgaaaatgaaattgcagagaatgcattttcacttatatttgcttttgatgaaatagtggcattaggttatagggaaagtgtcaatctgtctcaaattcgcacatttgtggaaatggactcgcacgaagaaaaagtttatcaggccgtgagacagactcaagagcgcgaggccaagaatatgatgagagaaaaggcaaaagaacttcagagacagaagatcgaagcggccaaaaaaggagggaagacctcgtttggtagtagcggtggctttggcagctcgacaggttatactcctacgccatctgttggtgatgtagctaaccagacaaatgatgttaaaacttcttcatacacaccagcccctgcgcaaaaacctcggggtatgaaattaggtggaaaaggtagagatgtagaatcattcgtagatcagcttaaatcggaaggagaaaacgtcattactccaaacaaaaatagtatttcacagccaggaactaaagctccagctatcaaaactgacatcgatgatgttcatttaagattggaagaaaaattaatagtgagaataggtcgtgatggtggcgtacaacaattcgaattattgggacttgctactttacacattggagatgagagatggggtaggatacgtgtgcaattggaaaatcagaatacccacggtgttcaacttcaaacgcatcctaatgtagataaagaattattcaagctacgctcacagattggattgaaacaaccggctaaaccttttcctctaaatacagatgttggtgtactgaaatggagattacaaagtactgaggaagctctaattccactcttaataaattgctggccttcagaagcgggagatggtagttgcgatgttaatatagaatatgagcttgcccacactaatttggaactagttgatgtcaatattgttattcccttgccaattggatgttcaccaatagttggtgaatgtgatggtatgtacacacacgaagccaagcgtaatcaactggtatggaatttgcctctgattgatgccagtaataaaactggttctttagaatttaacgctcctagggccatacccgctgatttcttcccgctttccgttggattcaattcgaagtcatcctatgcgagtattaagattaccgaagttgtcctagttgatgatgattctcctataaaatattcagtggagaccgcactatatccagataaatatgaagtagtataatggggcagaagtaaagaatcacttgtaaaaattatataactaatattatatcttatatgcaacattgctttttgtacaaaagttaagtaacttgtctttattttatctatattaataaaataagtaagaaag

SEQ ID NO: 505 - DNA, 612 bp, Diabrotica virgifera
  misc_feature (1)..(612): RNAi target sequence
attctgatcccagcacacaaattttgtataaccggacaatggcgcatttgggattgtgtgcatttagacacgctaacattaaggatgcccataactgtttagttgatttgatgatgactggaaaaccaaaggagttactggcacaaggtttgcttccacaaagacaacacgaacgcagcaaagaacaggagaaaatcgagaaacagcgtcaaatgcccttccacatgcacatcaatctcgaactcttagaatgtgtgtatttagtctccgccatgttgatcgaaatcccgtatatggctgcgcatgaattcgacgccagacgcaggatgatttctaagaccttctatcagcagttgcgttcttccgaacgtcaaagcttagtgggacctccggaaagcatgcgagagcacgtcgtcgcggcggctaaagcaatgatgaacggcaattgggcggcatgcaacacttttatcattaacgacaagatgaatgccaaagtgtgggatctgttttaccaagccgaccaagttagatccatgttgacgaaattgataaaagaagagtctttgaggacgtatttgtttacctactcccacgtttacgattcaatttcga

SEQ ID NO: 506 - DNA, 22 bp, Artificial Sequence
  primer
  misc_feature (1)..(22): forward primer
attctgatcccagcacacaaat

SEQ ID NO: 507 - DNA, 22 bp, Artificial Sequence
  primer
  misc_feature (1)..(22): reverse primer
tcgaaattgaatcgtaaacgtg

SEQ ID NO: 508 - DNA, 2785 bp, Diabrotica virgifera
  misc_feature (1)..(2785): WCRW transcript ta05048.001_diavv
caatgactaatgtcacctcgctcttttaactcacgttgcatatgtgaggtattttccaaaattcgagaaaagtttatttagtgttattataataagggaaaacagtaaaaatgagtagatttttcgctggatccgattcagattcggatagctcatccgaagaagagattatccaacgtccccaagtaccagcttatactttcagtgacgatgaggaggaggtaaaacgtgtagtaagatcagcgaaagaaaagcgctatgaagaacttacaaatactattaaacaaatcagaaattttaagaaaattaaggatatgtctagcatgttgaatagttttgaggaattacaaaaggcataccaaaaagctgctcctgttattgtcaaagaagaaaatggccagactccaagattttttattaggtgtttggccgaaatggaagactttattaatgaaatgtgggaagatagagatgggaggaaaaacatgagcaaaaacaatagcaaatcactcacatctatgagacagaagttgagaaaatatttgaaagattttgaagatgacttggctaaatttaaggaaaacccagaacagcctgatgatgaggaagaggaggaaaagcctgaagtagctgaggattccgagaacgaagctccatccaaaaacgcgtttctcaaagctccacccaaacaagttgtagacgacaaagatgaatcgtcagactcggatgactggccatctgactctgaatctagtctgtcatcatctgatgacgacgaaggcaaataccagagcataagggagcgtttcttgaagagaactgggcccgctcacgaagaagatgaagaaagggaaaggagaaaggaggagaaaaggaaggagagaaaggagaaaggtaggaagttgaaaaaggatgaggaggaggatggtgaaggcaagtgggagactgttaatcgaggtttcgccatccctagtgaaaaacctaaaatgttcgccaaggacgccgaaatcgatctaaaccttgtaatcaagaaactcagcgaaatcatggcagctagaggcaaaaagcgcacagatagacgcgaacaaatagaactcctgcacgaactccaaaatgtttctgagcaacaccaattgggagcggctattttcattaaaattaaactcgccatcatatctgccattttcgattacaaccccaaagtttctgacgcaatgaagccggagtattggctgaaattgctggagaggatgagcgaaatgttgggcatgttgttgaatactaccaatctagtagtttctgatggaattactgaagaaatggaaaatcttgaagaacccccgtatcgcattaggggctgtatactaacatcagtggaaagactggatgacgagtttactaaactactcaaagagtgtgatcctcacagtaacgagtatgtagaacggttaaaggatgaatgtaaggtttctagtatcatcgataaaacaatgaaatacttggaaaggagtaacgtatcttccgaactatgtaggatatatttacgaaaaatcgagcatttgtattacaaattcgatcctagagtattacagcaaaaagctgatcctctcgtagtacccaaagacgagatgaactccgtgcaagaaatggagaaactatgcaaatttatctacgcaaaagatagtactgacagattgagaactagagctattttgtcccatatatatcatcacgctctgcatgacaactggttccaagcaagggatttggtattgatgtcacatctacaagaaacgattcagcattctgatcccagcacacaaattttgtataaccggacaatggcgcatttgggattgtgtgcatttagacacgctaacattaaggatgcccataactgtttagttgatttgatgatgactggaaaaccaaaggagttactggcacaaggtttgcttccacaaagacaacacgaacgcagcaaagaacaggagaaaatcgagaaacagcgtcaaatgcccttccacatgcacatcaatctcgaactcttagaatgtgtgtatttagtctccgccatgttgatcgaaatcccgtatatggctgcgcatgaattcgacgccagacgcaggatgatttctaagaccttctatcagcagttgcgttcttccgaacgtcaaagcttagtgggacctccggaaagcatgcgagagcacgtcgtcgcggcggctaaagcaatgaggaacggcaattgggcggcatgcaacacttttatcattaacgacaagatgaatgccaaagtgtgggatctgttttaccaagccgaccaagttagatccatgttgacgaaattgataaaagaagagtctttgaggacgtatttgtttacctactcccacgtttacgattcaatttcgatggccactttggcggaaatgttccagttgggcaaacccgtcgtgcattctattatttctaagatgatcattaacgaagaattgatggcatctttagacgacccgactcaaactgttgtaatgcacagaagcgaaccatcccgtctacaatctttggctttgcaactggcggataaaatcaacaatttcgtcgattccaacgaaagaatattggaatccaaacaaggaaacttcttcctaaggggagcaaaccagggcaatttccgaggagataggcagaactaccgcggaaataaccaaaactgggataggcaacgtcgagacagggatagaaaggaaaaagataattattaataaacatagatcttttg

SEQ ID NO: 509 - DNA, 503 bp, Diabrotica virgifera
  misc_feature (1)..(503): RNAi target sequence
ggggctctttagttgtcatctgtcatttaagtagtaatttcattccaaaatgaagatcggactttgtgcttacagcgggtacaaaatttaccccggacatggcaaaacaatggttaaagttgatggaaagaccttcattttcctcaactcaaaatgtgaaagggcgcacttgatgaaaaggaacccccgtaaagtaacatggactgtcttgtacagacgtaaacataagaagggtcaggaggaagaagccaccaaaaaacgtaccagaaggacacagaaattccaaagggctattgtaggtgcttctttaaatgatatcatggccaagagaaaccaaaggcctgaagtaaggaaggcccaaagggagcaagccattcgtgccgctaaggaacagaaaaagagcacaaagacagccaggaaggctacagcccccgccaaggccaaacctgctcctaaacagaaagtaaccaagaatcaacccaaagctgcacctagagtaggag

SEQ ID NO: 510 - DNA, 19 bp, Artificial Sequence
  primer
  misc_feature (1)..(19): forward primer
gctctttagttgtcatctg

SEQ ID NO: 511 - DNA, 23 bp, Artificial Sequence
  primer
  misc_feature (1)..(23): reverse primer
ctcctactctaggtgcagctttg

SEQ ID NO: 512 - DNA, 2131 bp, Diabrotica virgifera
  misc_feature (1)..(2131): WCRW transcript ta01391.001_diavv
aaagatggaaggaaatgaggccaatacttagcccatcgttcacaagcagcaaaatgaaatcgatgtttatgctgatgtcagaatgtggcgaaaagttggtcaaattttttatggaaaaagaccagaatgctatagaaattgaaatgaaagacacattaacgcgttatactaatgatgttattgcctctgcagctttttggagtacagattgattctttaaacaacactgaaaatgaattctatctcatgggaaaaaatgcaaccaatttccgtggtttctggaggactatgaagttgtttggatatatgattataccaaaaatatttgagttctttaaagtgacattgtttgatatgaacgttcgacgattttttactgaattgattagtggaacaataaagatcagggaagagaaaggcattattcgtcccgatatgattcacctactcatgcaagcaagaaaaggaatccatcaaaaagaagaaaaggttgttgatgctggatttgctgtagtacaagaatcgaatttagaatcaaaagtagttgcgacagaaatgaccgacttagacatctgcgctcaagcattgattttcttctttgctggatttgagacggtctcgtcaaccatgtgctttgtggctcatgaattggcctgtaatcctgatgtccaatcgagattaagagatgaaatacgtgaaacactcgatcaatgtaatggaaaagtaacctacgaagctatgttgaaaatgaaatatctggatatggtaatatcagaatccatgaggaaatggccagcagttatagctgttgatcgaatttgcaccaaaccatacacactcgaaccagcaacactcgatgagaagcccctccacttagacaaaggcaccataatctggttccccatttacggtctccaccgcgatcctaaacactacccagacccagaacggtttgatcctgaaagattcagcgatgaaaacaaaggaaacatcaatccatacgcttaccttccatttggagtcggccctagaaactgcatcggttccagatttgctttattagagatgaaagtattgtttttccatttgttagccaattttgagattgtgccaggtccaaagacggaaattcctttgcggatttgtaagaaacaattcggtttgactgcagaaaatggtttttggttcaacttgaagaaactgaagaattagtctttgatatgtttgataaaagtcttgataaaatattgtttaaccatatctacttatttggtgtaatgtattttctagtcataattcttttaaactttttcttaacgtttcagcgggcgcaccctataatttcacatgagaagacgcgtgtcgtagattatacgtctttgcgtaaataatgtcttcttcaaataaatgtttggaaattgttacaatgatattttcttcttcttcctgcttccttataggctcgcatctgttctatcttcggatgcctcttcatcagatatccgcagcacgtccacacaggtaaacctaaacataaaaacgggggctctttagttgtcatctgtcatttaagtagtaatttcattccaaaatgaagatcggactttgtgcttacagcgggtacaaaatttaccccggacatggcaaaacaatggttaaagttgatggaaagaccttcactttcctcaactcaaaatgtgaaagggcgcacttgatgaaaaggaacccccgtaaagtaacatggactgtcttgtacagacgtaaacataagaagggtcaggaggaagaagccaccaaaaaacgtaccagaaggacacagaaattccaaagggctattgtaggtgcttctttaaatgatatcatggccaagagaaaccaaaggcctgaagtaaggaaggcccaaagggagcaagccattcgtgccgctaaggaacagaaaaagagcacaaagacagccaagaaggctacagcccccgccaaggccaaacctgctcctaaacagaaagtaaccaagaatcaacccaaagctgcacctagagtaggaggaaaacgttaatattgtataaacgttatttaataaaataagtttttttccataaaaaaaaaaaaaaaatgcgaaaaaaaaacatgt

SEQ ID NO: 513 - DNA, 502 bp, Diabrotica virgifera
  misc_feature (1)..(502): RNAi target sequence
aaagtttttgagccgtcaacatgggtaagccccgtggattgagaaccgctaggaaacatgtgaatcaccgtcgtgaacaaagatgggctgataaagattacaaaaaggcacatttaggaactagatggaaggctaatccttttggaggtgcttctcatgctaaaggaattgtattggaaaaagtgggagttgaagcaaaacaacctaactctgctattcgcaagtgcgttagggtacagttaattaaaaatggtaaaaaaatcacagccctcgtacctagagatggttgcttaaaccatatagaagaaaacgatgaagttctagttgcaggttttggacgtaaaggtcatgctgtaggagatattcccggagttagatttaaggttgttaaggtcgctaatgtgtccctattagctttatacaaagaaaagaaggaaaggccaagatcataattaaaatgttattttttttatttatttgcttggcacttttaatttttaaa

SEQ ID NO: 514 - DNA, 22 bp, Artificial Sequence
  primer
  misc_feature (1)..(22): forward primer
aaagtttttgagccgtcaacat

SEQ ID NO: 515 - DNA, 24 bp, Artificial Sequence
  primer
  misc_feature (1)..(24): reverse primer
tttaaaaattaaaagtgccaagca

SEQ ID NO: 516 - DNA, 616 bp, Diabrotica virgifera
  misc_feature (1)..(616): WCRW transcript ta00545.001_diavv
ggggattttcggttggggggttgggagcagttatgggggctttccggtcaaagtttttgagccgtcaacatgggtaagccccgtggattgagaaccgctaggaaacatgtgaatcaccgtcgtgaacaaagatgggctgataaagattacaaaaaggcacatttaggaactagatggaaggctaatccttttggaggtgcttctcatgctaaaggaattgtattggaaaaagtgggagttgaagcaaaacaacctaactctgctattcgcaagtgcgttagggtacagttaattaaaaatggtaaaaaaatcacagccttcgtacctagagatggttgcttaaaccatatagaagaaaacgatgaagttctagttgcaggttttggacgtaaaggtcatgctgtaggagatattcccggagttagatttaaggttgttaaggtcgctaatgtgtccctattagctttatacaaagaaaagaaggaaaggccaagatcataattaaaatgttattttttttatttatttgcttggcacttttaatttttaaataaagtgttaagcatataattttgtacagtgttttatttcaataaacaattttatacctgaaata

SEQ ID NO: 517 - DNA, 719 bp, Diabrotica virgifera
  misc_feature (1)..(719): RNAi target sequence
gggtgatccttcagttttcgtccacgcgtgtcaaaatggcgaaaaagaaaccagaggataaaaataatcaaagcgatgatgatacaaaaaacgagagtgattactcgtcgaacgaagaagaaccaaacttcagtgatcctgaagactacgaagacgatgtctctgatgaagaactcttaggtgatgttttaaaagaaaagcctaaggaaactgatggagtagaaagtgttatagtagtagatggagttcctcaagtaggtcctaatcgtattgaaaagttgaagtcagtcattgtcaaaatatttgtgaagtttggaacaatagtaaatgaattctaccctgtcaatagtgagggccacaccaaaggttatatctttatagaatattcctcaccatctgaagctgctgaggctgttaagctcactaacaattttaaattggataagcaccatacctttcaagttaacctctttactgatttttctaagtatgaccaaattcctaataagtgggaccctccagagccacaaccttaccaagggcaagcagacttgcattcttacttattggaaccggatgcatatgatcagtttgctgtagttgttgcacaaacacaagctgtgcaaatttggcagaatacacagcctgatcctagtctcattgaagctagaaacagctggagtcaaacgtacataaaatggtcacctctgggtacattc

SEQ ID NO: 518 - DNA, 19 bp, Artificial Sequence
  primer
  misc_feature (1)..(19): forward primer
gtgatccttcagttttcgt

SEQ ID NO: 519 - DNA, 22 bp, Artificial Sequence
  primer
  misc_feature (1)..(22): reverse primer
gaatgtacccagaggtgaccat

SEQ ID NO: 520 - DNA, 2397 bp, Diabrotica virgifera
  misc_feature (1)..(2397): WCRW transcript ta01172.001_diavv
gggggtgatccttcagttttcgtccacgcgtgtcaaaatggcgaaaaagaaaccagaggataaaaataatcaaagcgatgatgatacaaaaaacgagagtgattactcgtcgaacgaagaagaaccaaacttcagtgatcctgaagactacgaagacgatgtctctgatgaagaactcttaggtgatgttttaaaagaaaagcctaaggaaactgatggagtagaaagtgttatagtagtagatggagttcctcaagtaggtcctaatcgtattgaaaagttgaagtcagtcattgtcaaaatatttgtgaagtttggaacaatagtaaatgaattctaccctgtcaatagtgagggccacaccaaaggttatatctttatagaatattcctcaccatctgaagctgctgaggctgttaagctcactaacaattttaaattggataagcaccatacctttcaagttaacctctttactgatttttctaagtatgaccaaattcctaataagtgggaccctccagagccacaaccttaccaagggcaagcagacttgcattcttacttattggaaccggatgcatatgatcagtttgctgtagttgttgcacaaacacaagctgtgcaaatttggcagaatacacagcctgatcctagtctcattgaagctagaaacagctggagtcaaacgtacataaaatggtcacctctgggtacattcttatgtacttttcacaggttgggtgttgcattgtgggcaggacctggatttttgcaatacaaaaaatttacccattcaaatgttcaatttattgatttctcgccatgtgaaaagtatttagtgacttattccccacaaggagacccacataatccagaacagaaaaggatcatcatttgggatattaggacaggtcttgaaaagcgttcattcaatccagaaggtccaacagcatggccaatcttcaggtggtctcatgacgacaaatattttgctcgtattggtcaaaacaatgatgcccttcaagtatacgaaacaccatcttttggtcttctagataagaaatcaatcaaaattaacggcataagagatttcaattggtcgcccacagataatgttgtagcttattgggtagccgaagacaaagatgtgcctgccagtgtaactctgttagaattaccaaacaggaatgaaattagaaagaagaatttgtttaatgttgctgactgtaagatacactggcagaagtctggagattacctgtgtgtcaaggtagacaggtattcaaaggttcgcaaggagaagaatgaaaccaagtattcaggtatgtactgcaactttgaaatattccacatgaaggagaagcaaatacctgtagacagtgtagagtgcaaggaacccattcaggcgtttgcatgggagccggttggttctaaatttgcaatgatccatggcgaatcccccagcatcagtgccagtttctacgaggttaggataggacaggctcctatccttctcaagaaatttgagaaaagagcttgcaaccatctgttttggtctcctagtgggcagttcatagttttagcaggcttgggttccaacggaggtggatcgctggaatttgttgatactcacgaatttttaatcatgaacactacagaccatttccaattgtcagatgtagagtgggatccaactggaagatatgtaattactggagtctcattttggaagaccaaggttgatacaggttattggatttggtccttccaaggaaaaatcctcaagcgcatcaatttggaaaagttctcccagattctctggagacctagaccaccatcattactcagcgatgaaaagcaaaaggaggtcaagaagagcctaaagaaatactacccgcagttcgagagcaaagacaggatgcgacaatccaaggcttccaaggaacttatcgagaagagagctgctcttatggagaaattccaagcctacagagaggagaggatcgaggagtacttggaccaaaaatcaaggcgtttgcagcttagaaataacattgacactgatgaattaaatgcagagaacgttgaggaggaaatcgtagaattctttattaaagaagaagtaattccagtcgactagcaccatcttgaaagtccggtcctttccctgcgtgtgctttgttacaacacattcagggagatttaaagtgaaaacgttaaatattataatataaaaaatatttgtattttggacattgacataaatatttgttaatcaagtgtctcgttcaattaatagtgttttatatttttgacacgcgtaccatctttccaaaaactaatgaacattgttattaaacgccttgtggttactaaaataaaaaattcaataag

SEQ ID NO: 521 - DNA, 639 bp, Diabrotica virgifera
  misc_feature (1)..(639): RNAi target sequence
ccgtgatatgggttacaacgtatctatgatggctgactcgacatcacgttgggccgaagctttgagagaaatttcaggtcgtttggctgaaatgcctgccgattccggttatccggcttacttaggtgcccgtttggcttccttctacgaacgtgctggtcgcgttaaatgtttaggtaatccagacagagaaggatccgtttcaattgtaggagccgtatcacctcctggtggtgatttctcagatcctgttaccactgctactcttggtattgtacaggtgttctggggtttggacaagaaacttgcccaacgtaagcacttcccttcagtagactggcttggatcatattccaaatatttaagagcattggacgacttttatgacaaaaacttccaagagtttattcctcttagaaccaaagttaaggaaattcttcaggaagaagatgatctagccgaaattgtgcagctggtaggtaaagcatctctggcagaaacggacaaaatcaccttggaaattgccaggcttcttaaagaagatttcttgcaacaaaactcatactcttcttatgacagattctgtccattctataaaactgtcggtatgttgagaaacatgatcggtttgtacgacat

SEQ ID NO: 522 - DNA, 22 bp, Artificial Sequence
  primer
  misc_feature (1)..(22): forward primer
ccgtgatatgggttacaacgta

SEQ ID NO: 523 - DNA, 22 bp, Artificial Sequence
  primer
  misc_feature (1)..(22): reverse primer
atgtcgtacaaaccgatcatgt

SEQ ID NO: 524 - DNA, 2533 bp, Diabrotica virgifera
  misc_feature (1)..(2533): WCRW transcript ta01291.009_diavv
cggagatgaagagaagggtcagtcagctgacttatcttatgacaagttgttcagtttgggaaaactcgtccataatggggatagttgagtgggtgaggttccaagagaaacataacatccatccacaaatatgtcgaaagtaaggatcggagatgaagagaaggaagggcagtatggttatgtccatgctgtctcaggtccagtcgttactgctgagaaaatgtctggttctgctatgtacgaactggtacgtgtcggatactatgagctggtaggagaaatcattagattggaaggtgacatggctactattcaggtatacgaagaaacatcaggtgtaactgttggtgatccagtattaagaactggtaaaccactttcagtagaacttggacctggtattatgggttccatttttgatggtatccaacgtccattgaaagacatttgtgacgctactgatagtatttacatccccaagggtattaatgtaccttctttatcgagaacagcaaaatgggacttcaacccaatcaacatcaagttgggatctcacttaactggaggtgatatatatggtctagttcatgaaaacacccttgtcaaacacaaaatgattctgcctcctagagctaagggtactgtaacctacattgcagaaccaggaaactacactgttgatgaagtagtattggaaactgaatttgatggtgatcgtaccaaatatactatgttgcaagtatggcctgtacgtcaagcaaggccagtcagtgaaaaattacctgccaaccatcctctgcttacaggacagcgtgtacttgatgctcttttcccatgtgtacagggtggtactactgccattcccggagctttcggttgtggaaaaactgtaatttcacaatctctttccaaatattccaactctgatgtcattatctacgtcggttgcggagaaagaggtaacgaaatgtctgaagtattgagagatttccctgaattgactgttgaaattgacgggcacactgaatctattatgaaacgtaccgcattggtcgccaacacatctaacatgcctgtagctgctcgtgaagcttctatctatactggtattactctttctgaatacttccgtgatatgggttacaacgtatctatgatggctgactcgacatcacgttgggccgaagctttgagagaaatttcaggtcgtttggctgaaatgcctgccgattccggttatccggcttacttaggtgcccgtttggcttccttctacgaacgtgctggtcgcgttaaatgtttaggtaatccagacagagaaggatccgtttcaattgtaggagccgtatcacctcctggtggtgatttctcagatcctgttaccactgctactcttggtattgtacaggtgttctggggtttggacaagaaacttgcccaacgtaagcacttcccttcagtagactggcttggatcatattccaaatatttaagagcattggacgacttttatgacaaaaacttccaagagtttattcctcttagaaccaaagttaaggaaattcttcaggaagaagatgatctagccgaaattgtgcagctggtaggtaaagcatctctggcagaaacggacaaaatcaccttggaaattgccaggcttcttaaagaagatttcttgcaacaaaactcatactcttcttatgacagattctgtccattctataaaactgtcggtatgttgagaaacatgatcggtttgtacgacatggcgagacacgctgtagaatcaaccgcacaatcagaaaataagatcacttggaacgtaataagagattcaatgagtggaattttatatcaacttagcagtatgaaatttaaggatcccgtaaaagatggtgaagctaaaatcaaggcagattttgatcaattatatgaagatattcagcaggccttcagaaacttagaagattaaatctttttaaggaaattttcctattttgttcatcagtgtaagtttaaaaatatagcgatatttatcaaaaagaataataaggcctctatccctcacttctgtgaatattaatatggccgtactaatgatagtaactaaagataggttttctcttttttgatattatcctgtacaaaataaattatgtaaattgttgaatatgtgtatagtttttttgggtgagggtacagtgcttattaaatactttttaaacatttttcccgccattccaattactattaagttttttcgttttaatacttttttaaatatacaggtgcttaatatcgtttatattttcagtattacttggttttcttcatgtaaattgttttaaatttttcttttacccttttaatcttgtatattacattacccaattaaagttaattgtacagattaagataaacgagtatcttataacatctattagattgttagaatcaataaatgtagtgtaattgttctgttttgaacaaataaatgcatcattattgttgttaaaaaaaaaaaaaaaaaaaa

SEQ ID NO: 525 - DNA, 507 bp, Diabrotica virgifera
  misc_feature (1)..(507): RNAi target sequence
ggggtccttttactgtgtttcttaggatttggaaggtacaaaatgaccaactctaaaggttaccgccgaggaaccagggatctatttgcccgcaagtttaaaaaacgtggtgtaattccactttccacatatttgagagtctacaaagttggagatattgtagatatcaagggtaatggtgcagttcaaaagggtatgccccacaaagtgtaccatggtaagaccggacgtgttttcaatgttactgcacatgcattaggtgtaattgtaaacaaaagggttcgaggaagaatcatccccaaaagaatcaatctccgtattgaacatgtaaaccactccaagtgtcgtcaagacttcttgcaaagagtaaaatccaatgaaaagctacgtaaagaagctaaagaaaagaacattaaagtagaacttaggagacaacctgcccaacctaggccagcacatattgttagcggaaaggttccagcacaggtgcttgctcctatcccatat

SEQ ID NO: 526 - DNA, 20 bp, Artificial Sequence
  primer
  misc_feature (1)..(20): forward primer
gtccttttactgtgtttctt

SEQ ID NO: 527 - DNA, 21 bp, Artificial Sequence
  primer
  misc_feature (1)..(21): reverse primer
atatgggataggagcaagcac

SEQ ID NO: 528 - DNA, 696 bp, Diabrotica virgifera
  misc_feature (1)..(696): WCRW transcript ta01222.003_diavv
cgataactgagtttccttcaatgataagttcatccttttgtttggtggagtttactactggaacacctggggggagagggggacagcgacatttcctccgccgggtccttttactgtgtttcttaggatttggaaggtacaaaatgaccaactctaaaggttaccgccgaggaaccagggatctatttgcccgcaagtttaaaaaacgtggtgtaattccactttccacatatttgagagtctacaaagttggagatattgtagatatcaagggtaatggtgcagttcaaaagggtatgccccacaaagtgtaccatggtaagacaggacgtgttttcaatgttactgcacatgcattaggtgtaattgtaaacaaaagggttcgaggaagaatcatccccaaaagaatcaatctccgtattgaacatgtaaaccactccaagtgtcgtcaagacttcttgcaaagagtaaaatccaacgaaaagctacgtaaagaagctaaagaaaagaacgttaaagtagaacttaggagacaacctgcccaacctaggccagcacatattgttagcggaaaggttccagcacaggtgcttgctcctatcccatatgaattcattgcttaggtttgtttatcttaaaataaaatcctttatataataaaaaaaaaaagaaaaaatcggcagatcccttaaaaaa

SEQ ID NO: 529 - DNA, 519 bp, Diabrotica virgifera
  misc_feature (1)..(519): RNAi target sequence
ggtcagtgaagccatcttggcaaacgttagtaacgtgaaataaaacttaaattttttcaaaatgggtcgtatgcacgcaccaggaaaaggtattgcccagtcggcattgccatacagaaggagtgtaccaacatggttgaaagtcacaccagaagaagtaaaagaccatatttttaaacttggcaagaaaggcttgactccatcacaaattggtgttatcctcagggattcatatggtgttgcccaagtaaggtttgtttctggaaacaaaatcttgcgtatcatgaaagctatgggtcttgcccctgatctaccagaagatttgtactaccttatcaagaaggcagtagctatccgcaaacatttagaacgtaacagaaaagacaaggacagcaaattccgtttgattttggtagaatcacgtatccaccgtttggctaggtactacaaaaccaagagcgtattggcacccaactggaagtacgaatcaagcacagcatctgctttggtcgcttaaat

SEQ ID NO: 530 - DNA, 19 bp, Artificial Sequence
  primer
  misc_feature (1)..(19): forward primer
gtcagtgaagccatcttgg

SEQ ID NO: 531 - DNA, 22 bp, Artificial Sequence
  primer
  misc_feature (1)..(22): reverse primer
atttaagcgaccaaagcagatg

SEQ ID NO: 532 - DNA, 596 bp, Diabrotica virgifera
  misc_feature (1)..(596): WCRW transcript ta05572.002_diavv
ggggctgggctcagtgaagccatcttggcaaacgttagtaacgtgaaataaaacttaaattttttcaaaatgggtcgtatgcacgcaccaggaaaaggtattgcccagtcggcattgccatacagaaggagtgtaccaacatggttgaaagtcacaccagaagaagtaaaagaccatatttttaaacttggcaagaaaggcttgactccatcacaaattggtgttatcctcagggattcatatggtgttgcccaagtaaggtttgtttctggaaacaaaatcttgcgtatcatgaaagctatgggtcttgcccctgatctaccagaagatttgtactaccttatcaagaaggcagtagctatccgcaaacatttagaacgtaacagaaaagacaaggacagcaaattccgtttgattttggtagaatcacgtatccaccgtttggctaggtactacaaaaccaagagcgtattggcacccaactggaagtacgaatcaagcacagcatctgctttggtcgcttaaattgtgcttttatgttaagtttataaaataaaaatttctactaaaaaaaaaaaaaaaaaatcggaaaaaaa

SEQ ID NO: 533 - DNA, 600 bp, Diabrotica virgifera
  misc_feature (1)..(600): RNAi target sequence
ggacagcttttcactgtcattcgtcattctgatacatttttttgggtactttgggttgtacttgggataaaagacctttttgtatttccaaatacattgtcatataaattaaaaaagaaatggctgccatcagatctatgtctcgccttcttattaatagatcacttcaaaccactgcaaagaggacctatgccgaccaaatgaacttcacatttgcagctggaaatcaggtttactatactgcaacttcagttaaacaagtagatgtgccatctttctctggtagctttggtatcctccccgcccatgtacccacactggctgtgctaaaacctggagtagtcactgtttacgaagatggtggtaatgttaagaaaatctttgtttccagtggtactgtcaccatcaatgatgattcatcagttcagattcttgctgaagaagcccacccagtagaaaacattgatgtcaatgcagcaagagacatccttaccaaagcccagagccagttatcatctgcaagtacagatgaggcgaaagctgaagcctccattgccgttgaagtgggagaagcgttagtcaaagcggctgaataataat

SEQ ID NO: 534 - DNA, 22 bp, Artificial Sequence
  primer
  misc_feature (1)..(22): forward primer
ggacagcttttcactgtcattc

SEQ ID NO: 535 - DNA, 22 bp, Artificial Sequence
  primer
  misc_feature (1)..(22): reverse primer
attattattcagccgctttgac

SEQ ID NO: 536 - DNA, 797 bp, Diabrotica virgifera
  misc_feature (1)..(797): WCRW transcript ta03508.001_diavv
ggtaggggagtgacagacagtcaggtggacagcttttcacggggattcgtcattctgatacattttttttgggtactttgggttgtacttgggataaaagacctttttgtatttccaaatacattgtcatataaattaaaaaagaaatggctgccatcagatctatgtctcgccttcttattaatagatcacttcaaaccactgcaaagaggacctatgccgaccaaatgaacttcacatttgcagctggaaatcaggtttactatactgcaacttcagttaaacaagtagatgtgccatctttctctggtagctttggtatcctccccgcccatgtacccacactggctgtgctaaaacctggagtagtcactgtttacgaagatggtggtaatgttaagaaaatctttgtttccagtggtactgtcaccatcaatgatgattcatcagttcagattcttgctgaagaagcccacccagtagaaaacattgatgtcaatgcagcaagagacatccttaccaaagcccagagccagttatcatctgcaagtacagatgaggcgaaagctgaagcctccattgccgttgaagtgggagaagcgttagtcaaagcggctgaataataatttaatttttgtaattttatgtaaatttaataaattagtgtctcaatggtactgttcattttaaaacaacaacatattagatctatacctctatgagttacaatttttacaaaaacgagaatcaatccaaatacataatttttgtttaccgttaaaaaaaaaaaaaaaaaa

SEQ ID NO: 537 - DNA, 612 bp, Diabrotica virgifera
  misc_feature (1)..(612): RNAi target sequence
gggggtttgtaaatctagtcattacagaaacagtaataataaattaccttgttctgattattttgtagaaattgtaaaatggaaaagtggtgtttttgtttgtttcttctttttatatggtttgtttccgcacgtggtgccaacaactcggagtatcctgacctacggccagaatggtcctattgttatgagttcacttggtttgggccagattataataacgtgtccacgtacaataatacgtgtgccgattatctggacgaaacaagagccgaaggtataccctgcgctgctcccatcgtaatatcgtatgatggaacgttaccggatatgcagtatctctgggacaaccacaaagaaagcgtactctgcaaacgcagcataaaccagatgtgtgtcaagtacacttacctctttaaccagaaaattgaaaatattacctacatgtgttctaaagttcagcatgaaggtgggggaaatattgacagtggatgctataaacagaaattggaaagaggatatgaaacagaagtgtgtgtatgtcaatcctccaatggaatttatcctccctgcaacagaagtgcctccatatttggttcgatcaatgttttc

SEQ ID NO: 538 - DNA, 19 bp, Artificial Sequence
  primer
  misc_feature (1)..(19): forward primer
gtttgtaaatctagtcatt

SEQ ID NO: 539 - DNA, 22 bp, Artificial Sequence
  primer
  misc_feature (1)..(22): reverse primer
gaaaacattgatcgaaccaaat

SEQ ID NO: 540 - DNA, 893 bp, Diabrotica virgifera
  misc_feature (1)..(893): WCRW transcript ta03675.001_diavv
ggtttgtaaatctagtcattacagaaacagtaataataaattaccttgttctgattattttgtagaaattgtaaaatggaaaagtggtgtttttgtttgtttcttctttttatatggtttgtttccgcacgtggtgccaacaactcggagtatcctgacctacggccagaatggtcctattgttatgagttcacttggtttgggccagattataataacgtgtccacgtacaataatacgtgtgccgattatctggacgaaacaagagccgaaggtataccctgcgctgctcccatcgtaatatcgtatgatggaacgttaccggatatgcagtatctctgggacaaccacaaagaaagcgtactctgcaaacgcagcataaaccagatgtgtgtcaagtacacttacctctttaaccagaaaattgaaaatattacctacatgtgttctaaagttcagcatgaaggtgggggaaatattgacagtggatgctataaacagaaattggaaagaggatatgaaacagaagtgtgtgtatgtcaatcctccaatggaatttatcctccctgcaacagaagtgtctccatatttggttcgatcaatgttttcctagtatttggaatactatggttatttgtttataaattattttgactaaaattgttgttattcatatctctgtataaaactttaaaaatctcaatacttactaaatttcaataaggataataaattattttaaatatgcagtattctattattttactgactattgcaaatgccactatcatattttgcaacttacacgacctatttgaaataccaccttctatacctttttgtcttttagaaattgtcggtcagatagtcaagagaggcagatgtcattaata

SEQ ID NO: 541 - DNA, 558 bp, Diabrotica virgifera
  misc_feature (1)..(558): RNAi target sequence
cgggggagtgattatctttgtaaaatggcacctacgaagccaaaagcagcggataaatccgcccccaagaaggaagaaaagaagaagcctgcggccgcaccagcagccggagccgctggagcttcttcctcaagttcaaaaacacccgccccagctccaaaagcagcagccaaagctgcaagcaaaccagctgacaagaaagcatcttcctcaaaaacccctgcacccgcacctaaagctgcctcagccaaaagctccgcgaaagcgcaagctgctgcccccaaaccaaaagccgctgctgctaaagctggaaaggctgcaggcaaaggtgctgccaaacccgcagccaaggctgcaggaaagaaaccagctgctgctggaaaggccaaggctcccgcaactcttattgctaagcccaagaagaatgttcctgttaaacaacaacagaaaggtgttggcaaaaagccagctgccagtgcagtgcaagtagcgagagcacttaaaatccaaaagaaagtaattaaaggccccaatggaacacactcaaggaaaatccgt

SEQ ID NO: 542 - DNA, 22 bp, Artificial Sequence
  primer
  misc_feature (1)..(22): forward primer
cgggggagtgattatctttgta

SEQ ID NO: 543 - DNA, 22 bp, Artificial Sequence
  primer
  misc_feature (1)..(22): reverse primer
acggattttccttgagtgtgtt

SEQ ID NO: 544 - DNA, 1017 bp, Diabrotica virgifera
  misc_feature (1)..(1017): WCRW transcript ta00525.004_diavv
gacgcttaggggaggggccttttagtgattatctttgtaaaatggcacctacgaagccaaaagcagcggataaatccgcccccaagaaggaagaaaagaagaagcctgcggccgcaccagcagccggagccgctggagcttcttcctcaagttcaaaaacacccgccccagctccaaaagcagcagccaaagctgcaagcaaaccagctgacaagaaagcatcttcctcaaaaacccctgcacccgcacctaaagctgcctcagccaaaagctccgcgaaagcgcaagctgctgcccccaaaccaaaagccgctgctgctaaagctggaaaggctgcaggcaaaggtgctgccaaacccgcagccaaggctgcaggaaagaaaccagctgctgctggaaaggccaaggctcccgcaactcttattgctaagcccaagaagaatgttcctgttaaacaacaacagaaaggtgttggcaaaaagccagctgccagtgcagtgcaagtagcgagagcacttaaaatccaaaagaaagtaattaaaggccccaatggaacacactcaaggaaaatccgtaactcagtccacttccgtcgtcctaagaccctcagaccacccaggagtcccaaataccccaagaggagtgttccccacagatcccgcatggatgcttacaatatcatcaaattcccattgaccaccgaagcagccatgaagaagattgaagataacaacacgttggtatttttagtacacactagggcaaacaagcaccacattaaagctgcagttaagaaattgtatgatatcaatgtagccaaggtcaacaccttaattaggcccgatggcaaaaagaaggcatatgtaaggttagctagagattatgatgctctagatgttgccaacaagattggcatcatataaattaatatcttaccttgttttattttttttgacatctaataaataagttgagaataaagttttttagtttgagttaaaaaaaaaaaaaatgcga

SEQ ID NO: 545 - DNA, 544 bp, Diabrotica virgifera
  misc_feature (1)..(544): RNAi target sequence
atgcgtgttgaggtcttttcttttcccaaaacttgacaaaaatgggtatcgacatcaaccataaatacgaccgtaaggttaggagaacagaacctagaagtcaagatgtatatttacgtcttttagtaaaactgtaccgttatttagcccgtcgtacaggggccaaattcaataaaataatcctgaaaagattgtttatgagcaaaatcaacagaccaccactatctttatccaagttagtgcgtttgatgaagaagcctggccgtgatggacttattgctgtcgtagtaggaacaattactgatgatgctaggatttttgaaattcccaaattgtctgtatgtgcccttcgcgtgacacaaactgctagggccaggatcttgaaagctggaggtgaagtcatcaccttcgaccaattggcactcagggccccaactggcaataaaactgtattgctacaaggcagacgtaatgcccgtgaagctgtgaaacactttggtcctgctcctggtgtaccacacagtcatgctaagccattggtaca

SEQ ID NO: 546 - DNA, 22 bp, Artificial Sequence
  primer
  misc_feature (1)..(22): forward primer
atgcgtgttgaggtcttttctt

SEQ ID NO: 547 - DNA, 22 bp, Artificial Sequence
  primer
  misc_feature (1)..(22): reverse primer
tgtaccaatggcttagcatgac

SEQ ID NO: 548 - DNA, 793 bp, Diabrotica virgifera
  misc_feature (1)..(793): WCRW transcript ta05162.001_diavv
ggctgtcgggggctggggggctaaccaaaattatacacatgcgtgttgaggtcttttcttttcccaaaacttgacaaaaatgggtatcgacatcaaccataaatacgaccgtaaggttaggagaacagaacctagaagtcaagatgtatatttacgtcttttagtaaaactgtaccgttatttagcccgtcgtacaggggccaaattcaataaaataatcctgaaaagattgtttatgagcaaaatcaacagaccaccactatctttatccaagttagtgcgtttgatgaagaagcctggccgtgatggacttattgctgtcgtagtaggaacaattactgatgatgctaggatttttgaaattcccaaattgtctgtatgtgcccttcgcgtgacacaaactgctagggccaggatcttgaaagctggaggtgaagtcatcaccttcgaccaattggcactcagggccccaactggcaataaaactgtattgctacaaggcagacgtaatgcccgtgaagctgtgaaacactttggtcctgctcctggtgtaccacacagtcatgctaagccattggtacattccaagggacgcaaatttgagagagcacgaggtcgtaggcgctcatgtggttacaagaaatagacttaagttaatcattttgtttctgctgtattcatatttgttgttcaataaataggaattgcagtacattggaattttgttttgtattttatagaatataacaaaataaaggaatttaatataaaaaaaaaaaaaaaaaaaaaaaaa

SEQ ID NO: 549 - DNA, 401 bp, Diabrotica virgifera
  misc_feature (1)..(401): RNAi target sequence
aaagaaaccgaaggcagagaaaaaggcaccaaaggagggtgcaactccaagtgataaaccctccgttaaaagacgtcctttcaaaagacatggacgtttatatgctaaagccatcttcacaggttacaaaagaggtcttcgtaatcaacacgaaaatacagccctattatctgtagaaggaaccagatcaaaagatgagagttggttttacgtaggaaagaaatgcgtctatgtatacaaagcaaaaaacaggacatgtgttcccggtaggcccaaatctgtcaaatccaaagttagggctatttggggaaaagtcaccagaccacatggcacaaggggtgcagtgagagccaaattcaataggaatttaccagccaaggctatgggacatcgtattcgta

SEQ ID NO: 550 - DNA, 21 bp, Artificial Sequence
  primer
  misc_feature (1)..(21): forward primer
aaagaaaccgaaggcagagaa

SEQ ID NO: 551 - DNA, 22 bp, Artificial Sequence
  primer
  misc_feature (1)..(22): reverse primer
tacgaatacgatgtcccatagc

SEQ ID NO: 552 - DNA, 1008 bp, Diabrotica virgifera
  misc_feature (1)..(1008): WCRW transcript ta00344.005_diavv
ccgattttttttttttttttttgtgttggaaaacgtattttttatttcttatttatatttataaaaacaactatatcttagatgggtacagcataatacgaatacgatgtcccatagccttggctggtaaattcctattgaatttggctctcactgcaccccttgtgccatgtggtctggtgacttttccccaaatagccctaactttggatttgacagatttgggcctaccgggaacacatgtcctgttttttgctttgtatacatagacgcatttctttcctacgtaaaaccaactctcatcttttgatctggttccttctacagataatagggctgtattttcgtgttgattacgaagacctcttttgtaacctgtgaagatggctttagcatataaacgtccatgtcttttgaaaggacgtcttttaacggagggtttatcacttggagttgcaccctcctttggtgcctttttctctgccttcggtttctttgccgctgcgtctgccattccgaagatctcgtttagaattaaaaagaagttatttcatttttctcctccaagtgataaaccctccgttaaaagacgtcctttcaaaagacatggacgtttatatgctaaagccatcttcacaggttacaaaagaggtcttcgtaatcaacacgaaaatacagccctattatctgtagaaggaaccagatcaaaagatgagagttggttttacgtaggaaagaaatgcgtctatgtatacaaagcaaaaaacaggacatgtgttcccggtaggcccaaatctgtcaaatccaaagttagggctatttggggaaaagtcaccagaccacatggcacaaggggtgcagtgagagccaaattcaataggaatttaccagccaaggctatgggacatcgtattcgtattatgctgtacccatctaagatatagttgtttttataaatataaataagaaataaaaaatacgttttccaacaaaaaaaaaaaaaaaaaa

SEQ ID NO: 553 - DNA, 542 bp, Diabrotica virgifera
  misc_feature (1)..(542): RNAi target sequence
aatctgtaaacatcggcgtagaatcgccattaatatataagtattttatatagaattaattcaaaatgccacccaagttcgatcccaccgaaattaaatatgtttacatgagatgtgtcggaggagaagttggagctacctcttctttggctcctaaaattggtccactaggtttgtctcccaaaaaagttggtgacgatattgccaaaggcactgctgactggaaaggtcttaaaatcacagttcagttgaaaatccaaaatcgtcaagctaccatttctgtagtcccatctgcctcctccctgatcattagggctcttaaagaaccaccacgcgataggaagaagcaaaagaacattaaacacactggtaacattactttcgatgaaatcatcgctattgccagacagatgaggcccaggtcaatggccaaacagttatccggaactgtaaaagaggttttaggaacagcccaatcagttggatgtacaattgatggtaaagcagcacatgatgttattgacgaggttaatgaaggaacc

SEQ ID NO: 554 - DNA, 23 bp, Artificial Sequence
  primer
  misc_feature (1)..(23): forward primer
aatctgtaaacatcggcgtagaa

SEQ ID NO: 555 - DNA, 21 bp, Artificial Sequence
  primer
  misc_feature (1)..(21): reverse primer
gttccttcattaacctcgtca

SEQ ID NO: 556 - DNA, 768 bp, Diabrotica virgifera
  misc_feature (1)..(768): WCRW transcript ta01789.001_diavv
ggaagatgattgaccatgtcaattgtcacgtcatgtgtcaggggtccttttcgaatttaccattgtgaaaatattttcactattgtaaaaatctgtaaacatcggcgtagaatcgccattaatatataagtattttatatagaattaattcaaaatgccacccaagttcgatcccaccgaaattaaatatgtttacatgagatgtgtcggaggagaagttggagctacctcttctttggctcctaaaattggtcctctaggtttgtctcccaaaaaagttggtgacgatattgccaaaggtactgctgattggaaaggtcttaaaatcacagttcaattgaaaatccaaaatcgtcaagctaccatttctgtagtcccatctgcttcctccctgatcattagggctcttaaagaaccaccacgcgataggaagaagcaaaagaacattaaacacactggtaacattactttcgatgaaatcatcgctattgccagacagatgaggcccaggtcgatggccaaacagttatccggaactgtaaaagaggttttaggaacagcccaatcagttggatgtacaattgatggtaaagcagcacatgatgttattgacgaggttaatgaaggaaccatagaagtaccagatgaataaactattattagaatattttttctaagttatcagttgttttatttaacctttatccaaatgtggcattttttaatttgttaagaatgtaattgatggattcgaccgttacttgatgg

SEQ ID NO: 557 - DNA, 450 bp, Diabrotica virgifera
  misc_feature (1)..(450): RNAi target sequence
  misc_feature (341)..(341): n can be any nucleotide
  misc_feature (413)..(413): n can be any nucleotide
  misc_feature (426)..(426): n can be any nucleotide
aggcatttcaaaaacaaccaaccgtttttctcaaccgcaaaagtggaggaaagaaaaatttaagacattctcgcagtgtagggctcggttttaaaactcccagagaggcaattgaaggttcttgcattgacaagaaatgtcccttcactggaaatgtatcaatccgtggccgtattctcactggagttgtccaaaaaatgaagatgcaaaggactattgtcatccgtagagattatttgcattatatcaggaaatacaatcgttttgaaaagaggcataggaatatgtctgtacatttatcaccctgcttcagggatgtggaaattggagatgtagttacnattggtgaatgcagaccactttcaaaaacagttagattcaacgtattgaaagtaactaaaggtagcagttcnaagaagagcttcnggaagttttgagtgatgaaacatt

SEQ ID NO: 558 - DNA, 22 bp, Artificial Sequence
  primer
  misc_feature (1)..(22): forward primer
aggcatttcaaaaacaaccaac

SEQ ID NO: 559 - DNA, 24 bp, Artificial Sequence
  primer
  misc_feature (1)..(24): reverse primer
aatgtttcatcactcaaaacttcc

SEQ ID NO: 560 - DNA, 615 bp, Diabrotica virgifera
  misc_feature (1)..(615): WCRW transcript ta02086.002_diavv
cttgtcaatgtaagaaccttcaattgcctctctgggagttttaaaaccgagccctacactgcgagaaggtcataaaggggaatcctttcttttactagtgaaaatggcggatcagaccgaaaaggcatttcaaaaacaaccaaccgtttttctcaaccgcaaaagtggaggaaagaaaaatttaagacattctcgcagtgtagggctcggttttaaaactcccagagaggcaattgaaggttcttacattgacaagaaatgtcccttcactggaaatgtatcaatccgtggccgtattctcactggagttgtccaaaaaatgaagatgcaaaggactattgtcatccgtagagattatttgcattatatcaggaaatacaatcgttttgaaaagaggcataggaatatgtctgtacatttatcaccctgcttcagggatgtggaaattggagatgtagttacaattggtgaatgcagaccactttcaaaaacagttagattcaacgtattgaaagtaactaaaggtagcagttcaaagaagagcttcaggaagttttgagtgatgaaacatttttaaaataaaaatcttataaaatgaaaaaaaaaaaaaaaaaa

SEQ ID NO: 561 - DNA, 225 bp, Diabrotica virgifera
  misc_feature (1)..(225): RNAi target sequence DV-HP2-FRAG1
gaaacgacaaggaggaaagttgtgtcttgcggagtactagaaacaccgagattcggacgaaagagtactttcctgttcgtgcccggtacgaaggttacctatgaatgcatccaagagttcgtgttggtaggtgatcagcggagagagtgtcaagcggatggaacatggaatattcctgaatacggatacacatattgcttacgtcagcaggaatactctcaacga

SEQ ID NO: 562 - DNA, 212 bp, Diabrotica virgifera
  misc_feature (1)..(212): RNAi target sequence DV-HP2-FRAG2
gagcattgttccacagggaattcggaaggacttcagcgacttacaacaacaaaacgttcaagcctcaattcctaatgaatccggaagatttcctaccaaccaacagatctacagatcttaagcgaatatccgaaatatgtcctctaaagttgtacgaatgttactacgattacgctatgacggttgacagggatttggcgcattacaccaag

SEQ ID NO: 563 - DNA, 210 bp, Diabrotica virgifera
  misc_feature (1)..(210): RNAi target sequence DV-HP2-FRAG3
cttgggagaagcagaatttgaccacaaacgacaacgctaacatccgaatttctctctggggttacagagaaacgactatgaaaccagtgtttgtttatatcaccgatatcgctgataatgttcaaaacattggagaacacacgattgttccttctcagtttagaactagagtcaatcaatatctgactgatattaagtttggattcctcc

SEQ ID NO: 564 - DNA, 229 bp, Diabrotica virgifera
  misc_feature (1)..(229): RNAi target sequence DV-HP2-FRAG4
aatggaaagggagaattcgcattggtgaaatcagttacgcaaacggacaatctggaaatccaaggaagatttgagcaaatggaccctaacacttatggtgaggttagagctactcagctgacttctgtagtagctaaaggtaataacacaatagcaattgaagtcagaaggagacctctggattctagatggagatataggttggatgttatagcagataatagaagac

SEQ ID NO: 565 - DNA, 170 bp, Diabrotica virgifera
  misc_feature (1)..(170): RNAi target sequence DV-HP2-FRAG5
gaaacgacaaggaggaaagttgtgtcttgcggagtactagaaacaccgagattcggacgaaagagtactttcctgttcgtgcccggtacgaaggttacctatgaatgcatccaagagttcgtgttggtaggtgatcagcggagagagtgtcaagcggatggaacatggaa

SEQ ID NO: 566 - DNA, 233 bp, Diabrotica virgifera
  misc_feature (1)..(233): RNAi target sequence DV-HP2-FRAG6
gaaacgacaaggaggaaagttgtgtcttgcggagtactagaaacaccgagattcggacgaaagagtactttcctgttcgtgcccggtacgaaggttacctatgaatgcatccaagagttcgtgttggtaggtgatcagcggagagagtgtcaagcggatggaacatggaatattcctgaatacggatacacatattgcttacgtcagcaggaatactctcaacgacaagctgg

SEQ ID NO: 567 - DNA, 162 bp, Diabrotica virgifera
  misc_feature (1)..(162): RNAi target sequence DV-HP2-FRAG7
tttgttatttttgttttgtttagtgttagcgttaaaggactagatggtgatcttccaccagatgtcgaaactatcgatgtggagactacgaatgtaagtaacgcggatccagacgcagggaaacctattccggtggaagatacgcctaatggagtccctcca

SEQ ID NO: 568 - DNA, 473 bp, Diabrotica virgifera
  misc_feature (1)..(473): RNAi target sequence DV-HP2-FRAG8
gtgaatacaaactatgaagtagataaatccttagttaatgtaaccaatagtttggtaaatgtgactaaaaatcccagacggacttatcagacagttaataaaatgggcaaatattcgacattttatgctgcagattacgatcctatgacctcagacacagctccaccagacactgaccaacgaggaggaggaggaactccatacactatatcagaaccgagactggcagaaataaggaaacattttatgtacccatttttcgataaaggaggcagtgataataacttgggagatttccaaaaggacattcaatcttccattcctcaggtgcacaagaatttaaacttccagttgcctttctttggattcaggtataattacacaagagtttcagtgaatgggtatctggaattcagcgatccacctccaaattatgactatccattagtatttccaattaaagaatggcccaa

SEQ ID NO: 569 - DNA, 430 bp, Diabrotica virgifera
  misc_feature (1)..(430): RNAi target sequence DV-HP2-FRAG9
aaagaatgatcctgcctttattggcattttcttcagcagatgcagaatcggtaatctacgtgatggagacattgatcaaagaacacccggggtctattttagaatggaaagagatttaagaacgaggcaagacagaatgggtgtagaaattagagaaagacttaagtgggatatcagaacaggagtcattggatcagaaacattcgatcctaagcacgccgttattgtcacttggaaaaatgttactttcactggaggattcgctaatgctaaatacaagacaaacaccttccaaatggttcttgcaactgacgaagtcttcacttacgcgatgttcaactacctcaacttggactggacctcccacactgaagcgggtggtgattcccaaaacggggaaggtggtgtcagtgcctatgttggttttaac

SEQ ID NO: 570 - DNA, 486 bp, Diabrotica virgifera
  misc_feature (1)..(486): RNAi target sequence DV-HP2-FRAG10
ccagaagctacgaatacaatccttacagtcaagcttccgtcattcgagatctcacatcagttggatttggaaatggttttaagggaagacatattttccgtatagacgaagacattttgcttggatcgtgcaacaaagatatagatggtgccaaccttcccctgaaattcgctcctgaaagtggtaacatgttgggtggaacagtggtaaatataactggtccatgcttcaatttgaatgataggattcgatgcaagtttgacgtatcaaatgaagtatttgggtatgttgttgataaaaacagagctatctgtgtacaacctcaactttatgccgaaggatgggtgaatcttcaaattgctgttaattccgaagcattcaagtggaaggggaagtattatgtagaatcacctgctagtgcgactcaaaaaatcttctttaaggacatgaaattacacgaaaaatctccgagcgaattaaaaatca

SEQ ID NO: 571 - DNA, 500 bp, Diabrotica virgifera
  misc_feature (1)..(500): RNAi target sequence DV-HP2-FRAG11
aaattaatttaactgagtctatcacagttaatacatatactacaagccagagcagcatagaattaacaccggtaatatggagccgacccattccactcggttggtacttccagttccaatgggaaaaccagtacggtaaaaattggcccaaatatctatgtgacgattggctgagaacggacagatatctaaaaaacttcgcccacgaacttgctcaatgtccctgcaccgtcgaacaggctttagctgacaagggcaggtttatgccagacttcgattgcgacaaagattcgaacccgatttgttactataacaaccaagcacttcattgtgtgaaaactggatctcccactttagaaggctccgaacaacaatgttgctatgataaaaacggctttttgatgctctcttacgatcagcaatggggttctagtccgagacgttgccacaacttgggtaaaatgccttacaatgaagcgacaaaagtgcctactctctca

SEQ ID NO: 572 - DNA, 310 bp, Diabrotica virgifera
  misc_feature (1)..(310): RNAi target sequence DV-HP2-FRAG12
ggtgttactatttacactccaagctacatccttaatcaatcagaagtcatcattatgtttgacaatggagctggaatggaggttgtcgacaatcaaggattcatgagtgcaagagtatttttgccttggtcgtttataaataaaaccataggcctttttggaaattggagttttaacaaagaagatgacttcacacttccagatggttctagagcagcaatagtgaataacataaatgacatggaaagggtttacaatgattttggttccaaatggatgttggaggatgtgttagatcctcaaaagggta

SEQ ID NO: 573 - DNA, 1327 bp, Diabrotica virgifera
  misc_feature (1)..(1327): RNAi target sequence DV-RYANR-FIS
ggggataataagttcgattttttacgaaaatgacaagtatcgagactgtggggaccattgtcctgaaattgctgaagttggtgatcaatttgatatgtctcatcttgtaccgaaccggatatcaaggctacttcttgggagtaggaggaacctggaatctaaacgaagaaaaaaatcccgatgcagaaattgtggcttccggcgtattcgtaggatttatgatttacacattcgtctcgctgatcagcctttgcttcgctagtggagatcacaaaacgacattcactgatattctgatgaatatagtagggatttttatgtggatagctgctggagctacagctcttcattattggcttgggtacttgtccgaatacaaatacacgacaatagattctgaacgacaagttggtttggcgttaggagcgatgtgtataataaatggagcggtctatcttgtagacggagtactttccgcaatctttatcctcaaagccaaaatgcaataactttcatcgtaatataaatatatttatttaggttatatactttactttaagcagctcaagtataccgtgacatcccactcatacatcaatgtctataattgtttcatgacaaatcatttaatagtattttaaagcattcattcgttcaacaccttttttacatttttcaagtattatatcaatctttttaaagaattgtttggctattaaccggattcaatccatatagttccgtaaaataattatgcgttttaataattaatgtaattaaaaatagttagtatatttttgaaataaaacaactgccgcaacaaattagggagaatacttttgtctcctgtagttttatctgttatccaaagttcgattaaattgtttcaatttaatgtatttttccatataacgcaccaaatagtcttaaaaaaatagtgcctgttactacctaatactttctacgtatgccttatggttagtagtggctccaataggtgcattttacatttttcatgaaaattcaattcacattattttcctcccgttctcttcatattatatttatttattctttaatatagttttgggcgtgaagcccagtaaatacctatatgaagtatattgatggaactgccatgcttgatgggttttgtctgcaattaaaataaaaccaaaacaaacatttgtacagtattgtaaaattcacaatatttaggtagatgtttaaaatttaatattttttaagagtttgcatttatgttaatcgtagttaagtttttataaaaatttagtagttgtgagaaataaaataagtaaaagagaaa

SEQ ID NO: 574 - DNA, 193 bp, Diabrotica virgifera
  misc_feature (1)..(193): RNAi target sequence DV-RYANR-FRAG1
tttacgaaaatgacaagtatcgagactgtggggaccattgtcctgaaattgctgaagttggtgatcaatttgatatgtctcatcttgtaccgaaccggatatcaaggctacttcttgggagtaggaggaacctggaatctaaacgaagaaaaaaatcccgatgcagaaattgtggcttccggcgtattcgtag

SEQ ID NO: 575 - DNA, 145 bp, Diabrotica virgifera
  misc_feature (1)..(145): RNAi target sequence DV-RYANR-FRAG2
acgaaaatgacaagtatcgagactgtggggaccattgtcctgaaattgctgaagttggtgatcaatttgatatgtctcatcttgtaccgaaccggatatcaaggctacttcttgggagtaggaggaacctggaatctaaacgaag

SEQ ID NO: 576 - DNA, 83 bp, Diabrotica virgifera
  misc_feature (1)..(83): RNAi target sequence DV-RYANR-FRAG3
accattgtcctgaaattgctgaagttggtgatcaatttgatatgtctcatcttgtaccgaaccggatatcaaggctacttctt

SEQ ID NO: 577 - DNA, 292 bp, Diabrotica virgifera
  misc_feature (1)..(292): RNAi target sequence DV-RYANR-FRAG4
atttatgatttacacattcgtctcgctgatcagcctttgcttcgctagtggagatcacaaaacgacattcactgatattctgatgaatatagtagggatttttatgtggatagctgctggagctacagctcttcattattggcttgggtacttgtccgaatacaaatacacgacaatagattctgaacgacaagttggtttggcgttaggagcgatgtgtataataaatggagcggtctatcttgtagacggagtactttccgcaatctttatcctcaaagccaaaatgcaa

SEQ ID NO: 578 - DNA, 502 bp, Diabrotica virgifera
  misc_feature (1)..(502): RNAi target sequence DV-RYANR-FRAG5
ataataagttcgattttttacgaaaatgacaagtatcgagactgtggggaccattgtcctgaaattgctgaagttggtgatcaatttgatatgtctcatcttgtaccgaaccggatatcaaggctacttcttgggagtaggaggaacctggaatctaaacgaagaaaaaaatcccgatgcagaaattgtggcttccggcgtattcgtaggatttatgatttacacattcgtctcgctgatcagcctttgcttcgctagtggagatcacaaaacgacattcactgatattctgatgaatatagtagggatttttatgtggatagctgctggagctacagctcttcattattggcttgggtacttgtccgaatacaaatacacgacaatagattctgaacgacaagttggtttggcgttaggagcgatgtgtataataaatggagcggtctatcttgtagacggagtactttccgcaatctttatcctcaaagccaaaatgcaa

SEQ ID NO: 579 - DNA, 199 bp, Diabrotica virgifera
  misc_feature (1)..(199): RNAi target sequence DV-RYANR-FRAG6
gcagctcaagtataccgtgacatcccactcatacatcaatgtctataattgtttcatgacaaatcatttaatagtattttaaagcattcattcgttcaacaccttttttacatttttcaagtattatatcaatctttttaaagaattgtttggctattaaccggattcaatccatatagttccgtaaaataattatgcg

SEQ ID NO: 580 - DNA, 197 bp, Diabrotica virgifera
  misc_feature (1)..(197): RNAi target sequence DV-RYANR-FRAG7
ctgccgcaacaaattagggagaatacttttgtctcctgtagttttatctgttatccaaagttcgattaaattgtttcaatttaatgtatttttccatataacgcaccaaatagtcttaaaaaaatagtgcctgttactacctaatactttctacgtatgccttatggttagtagtggctccaataggtgcattttac

SEQ ID NO: 581 - DNA, 142 bp, Diabrotica virgifera
  misc_feature (1)..(142): RNAi target sequence DV-RYANR-FRAG8
gatttatgatttacacattcgtctcgctgatcagcctttgcttcgctagtggagatcacaaaacgacattcactgatattctgatgaatatagtagggatttttatgtggatagctgctggagctacagctcttcattattg

SEQ ID NO: 582 - DNA, 129 bp, Diabrotica virgifera
  misc_feature (1)..(129): RNAi target sequence DV-RYANR-FRAG9
cacattcgtctcgctgatcagcctttgcttcgctagtggagatcacaaaacgacattcactgatattctgatgaatatagtagggatttttatgtggatagctgctggagctacagctcttcattattg

SEQ ID NO: 583 - DNA, 152 bp, Diabrotica virgifera
  misc_feature (1)..(152): RNAi target sequence DV-RYANR-FRAG10
ggcttgggtacttgtccgaatacaaatacacgacaatagattctgaacgacaagttggtttggcgttaggagcgatgtgtataataaatggagcggtctatcttgtagacggagtactttccgcaatctttatcctcaaagccaaaatgcaa

SEQ ID NO: 584 - DNA, 587 bp, Diabrotica virgifera; identical to SEQ ID NO: 85
  misc_feature (1)..(587): RNAi target sequence DV-RYANR-RASRHO-FIS

SEQ ID NO: 585 - DNA, 163 bp, Diabrotica virgifera
  misc_feature (1)..(163): RNAi target sequence DV-RYANR-RASRHO-FRAG1
aagacggaagatccatggcagagaaaatcaatgcttttgcatatctagaatgttctgccaaaagtaaggagggtgtaagagaggtttttgaaaatgctacccgagctgcactgcaagtcaaaaagaagaagaagccccgttgtgtaatgttttgagccactac

SEQ ID NO: 586 - DNA, 178 bp, Diabrotica virgifera
  misc_feature (1)..(178): RNAi target sequence DV-DEAD-FRAG1
gaggattctagtagccacaaacttatttggacgtggaatggatatcgaaagagtgaacatcgtcttcaactatgacatgcccgaagattctgacacttacctgcacagagtagcccgagctggacgtttcggtaccaaaggtctagccattactttcgtatcagaagagggagatgcc

SEQ ID NO: 587 - DNA, 152 bp, Diabrotica virgifera
  misc_feature (1)..(152): RNAi target sequence DV-HPP15-FRAG1
ggacaactgaccttcatcactcaagtgactggcagtgtaaaataccaagagaaaacaccaaaaacctttcagcgaaacttcataattacagcacagggcgataaatggaaaattgtcagtgattgtatgaggctgcaagaaccattaaacgc

SEQ ID NO: 588 - DNA, 402 bp, Diabrotica virgifera
  misc_feature (1)..(402): RNAi target sequence DV-HPP15-BPSAR2-FRAG1
ttccattggtaacatgaggtttacgacgttcgatttggggggccacgagcaggctaggagagtgtggagggactactttccagcagtcgatgccatagtgttccttgttgatgccaacgacagctcaagatttgtagaaagccaggaacagctaaatgccctcctctcagacgaaactctatcaaactgtccaatacttatcttaggtaataaaattgatctcccaggtgctgcttcggaagatgaattacgaactagattcggcttgtttggccaaaccacaggcaaaggcaaagtagccagaaatgatctacccggtaggcctctagaactatttatgtgctctatactcaaaagacaaggttatggagaaggtttccgttggttggcacaatatatcga

SEQ ID NO: 589 - DNA, 171 bp, Diabrotica virgifera
  misc_feature (1)..(171): RNAi target sequence DV-HPP15-BPSAR2-FRAG2
ccattggtaacatgaggtttacgacgttcgatttggggggccacgagcaggctaggagagtgtggagggactactttccagcagtcgatgccatagtgttccttgttgatgccaacgacagctcaagatttgtagaaagccaggaacagctaaatgccctcctctcagacg

SEQ ID NO: 590 - DNA, 137 bp, Diabrotica virgifera
  misc_feature (1)..(137): RNAi target sequence DV-HPP15-BPSAR2-FRAG3
ttgatctcccaggtgctgcttcggaagatgaattacgaactagattcggcttgtttggccaaaccacaggcaaaggcaaagtagccagaaatgatctacccggtaggcctctagaactatttatgtgctctatactc

SEQ ID NO: 591 - DNA, 135 bp, Diabrotica virgifera
  misc_feature (1)..(135): RNAi target sequence DV-HPP15-BPSAR2-FRAG4
ggccacgagcaggctaggagagtgtggagggactactttccagcagtcgatgccatagtgttccttgttgatgccaacgacagctcaagatttgtagaaagccaggaacagctaaatgccctcctctcagacgaa

SEQ ID NO: 592 - DNA, 294 bp, Diabrotica virgifera
  misc_feature (1)..(294): RNAi target sequence DV-HPP15-BPSAR2-FRAG5
ctttataatttgtcgttgaaaaagatagggctccaaagtcctattgccaacaaaaaaacaacgcaagacattaaacaacttttttcaagcccatctgtatttaaaaaaacagtgcaaaatgtttctgtgggactggtttacgggaatgctgggatatctaggattgtggaagaaacctggaaaactattattcttaggactggataacgcaggcaaaactacccttctacatatgctcaaggatgacagactggcccagcatcttcccacgttacatcccacatcagaggagct

SEQ ID NO: 593 - DNA, 407 bp, Diabrotica virgifera
  misc_feature (1)..(407): RNAi target sequence DV-HPP15-BPSAR2-FRAG6
ttaattatgtatttttccatttcgttctgtcattgagttaggatattaatgtttgaggaactattggcaacactgcaactacctgattcatttcagatcttaggtactttacataaatatctaaatatagatgttggcaatgtaattttgaacaacagtatatacattcaatgtaaattatatatttttagttaagttaccttcttaaatggtgtttgagtggctatggtactgaaatagtttgactttttgtgttcttcgataactaaaaatgatttcttgtggaaagttacactcagaattacatagttaacttctttatcagcagttgttgtcaagatttccattttgagacgattgttttgtaaattaggtgggaatttttaaaatgttggactgttttttaa

SEQ ID NO: 594 - DNA, 168 bp, Diabrotica virgifera
  misc_feature (1)..(168): RNAi target sequence DV-HP1-FRAG1
ggggaaggtaaatcagtattcacttgatcttcaaggtagattaacgcaagtagaaatctaaaacatgtctggacgtggtaagggaggcaaagttaagggaaaagcaaagtcccgatcaaatcgtgctggtttacaatttcctgtaggtcgtattcatcgtttattgag

SEQ ID NO: 595 - DNA, 190 bp, Diabrotica virgifera
  misc_feature (1)..(190): RNAi target sequence DV-HP1-FRAG2
ggggaaggtaaatcagtattcacttgatcttcaaggtagattaacgcaagtagaaatctaaaacatgtctggacgtggtaagggaggcaaagttaagggaaaagcaaagtcccgatcaaatcgtgctggtttacaatttcctgtaggtcgtattcatcgtttattgagaaaaggaaattatgccgaaaga

SEQ ID NO: 596 - DNA, 159 bp, Diabrotica virgifera
  misc_feature (1)..(159): RNAi target sequence DV-HP1-FRAG3
ttggaattggcaggaaatgcagctagagataacaaaaagacccgtataattcctagacatttacaattggccataagaaatgacgaggaattgaacaaattactgtcaggagttaccatcgcccaaggtggagtattgcctaatatacaagcagtactt

SEQ ID NO: 597 - DNA, 196 bp, Diabrotica virgifera
  misc_feature (1)..(196): RNAi target sequence DV-RNAPOL-FRAG1
ctgttttaaagccatggctgatgaagaatttgacgaaaatgatgtagcagatgatttcgatgacgacgtagaggatgataatatcgaagaactcgaacaacccgaggaagatggagataacatcgatatccttgctccaggacaagcaggaggtggtgtaccaaaaaacaagaggataacaactaaatatatgacc

SEQ ID NO: 598 - DNA, 163 bp, Diabrotica virgifera
  misc_feature (1)..(163): RNAi target sequence DV-CPNN-FRAG1
ctgttggtgctacttgtcttccacgcctaacagctcccacatctcaagaacttggttacgcagatattgtatgtgtagaagaattgggtgatacccctatagtttctttcagattggagggcaaagaatcaagaatttccacaattgtcatcagaggtgctac

SEQ ID NO: 599 - DNA, 236 bp, Diabrotica virgifera
  misc_feature (1)..(236): RNAi target sequence DV-CPNN-FRAG2
cagccaaactcatgatactaggaagtcaaatgcaagattctgaggtgggtgatggaactaactttgtgattatacttgctggagcacttttggagcatgctgaagaactaattcgtcttggagtaactcccacagaaatagcagaaggttatgagaaagcactagacaaatgtctagaaatccttcctaatcttatttgctacacaatcaaggatttcagaaacatcgaagaagtc

SEQ ID NO: 600 - DNA, 149 bp, Diabrotica virgifera
  misc_feature (1)..(149): RNAi target sequence DV-CPNN-FRAG3
ttggagcatgctgaagaactaattcgtcttggagtaactcccacagaaatagcagaaggttatgagaaagcactagacaaatgtctagaaatccttcctaatcttatttgctacacaatcaaggatttcagaaacatcgaagaagtcaa

SEQ ID NO: 601 - DNA, 194 bp, Diabrotica virgifera
  misc_feature (1)..(194): RNAi target sequence DV-CPNN-FRAG4
ctgcagatgaacttatgaactttagtaggggagaagaaaatcttcttgaattacaaatcaaatgtatagcagatgctggagctaaagttgtagttgcaggagccaaatttggagatatggctctacattacttacataaatatggcatgatggttgtcaggttgaactccaaatttgatttgagaagattatgc

SEQ ID NO: 602 - DNA, 785 bp, Diabrotica virgifera
  misc_feature (1)..(785): RNAi target sequence DV-TEF2-FRAG1
tctggtaacatctgtggtttggttggtgttgatcaattcttggttaagactggtaccattaccactttcaaggatgcccacaacttgaaggtcatgaaattcagtgtatctcctgtagtacgtgttgctgttgaacctaagaaccctgctgatttgccaaaacttgtagaaggtttgaaacgtttgaccaaatccgatcctatggtccaatgtatcattgaagaatctggtgagcacatcattgctggtgccggagaattgcatcttgaaatttgccttaaggatcttgaagaagatcatgcctgcattcccattaagaaatctgaccctgttgtatcctaccgtgagacagtaagtgaagagtctgatcagatgtgcctctcaaaatcacccaacaaacacaacagattgttcatgaaagcttgtcctatgcctgatggacttgctgaagatattgatgatggtaaagttaacccacgtgatgacttcaaagtccgtgcccgttatcttactgagaaatatgactatgatataactgaagcccgtaagatctggtgctttggacctgatggtactggacccaacatccttgttgattgtactaagggagtgcaatatcttaatgaaatcaaagactctgtggtagctggtttccaatgggcaaccaaagaaggtgtcttgtctgaagaaaacttgagaggtgttagattcaacatttatgatgttaccttacacgctgatgctatccatcgtggaggtggtcaaatcattccaacaacccgtag

SEQ ID NO: 603 - DNA, 144 bp, Diabrotica virgifera
  misc_feature (1)..(144): RNAi target sequence DV-SRP54-FRAG1
tgggaggcatcaaaggtctcttcaaaggtggcgatatggctaaaaacgtcaaccacaaccagatggcgaaacttaatcaacaaatggccaaaatgatggaccctagagtcctccaacaaatgggcggcatggcaggtttgcaaa

SEQ ID NO: 604 - DNA, 364 bp, Diabrotica virgifera
  misc_feature (1)..(364): RNAi target sequence DV-SRP54-FRAG2
acgagttggacaacagggatggcgcaaaattgtttactaaacaagttggtagagtggtcagggtagcacaaggatctggtgtaacagaaagagaagtaaaagatctcattacgcagtacacaaaattcgcagcggtggtaaagaaaatgggaggcatcaaaggtctcttcaaaggtggcgatatggctaaaaacgtcaaccacaaccagatggcgaaacttaatcaacaaatggccaaaatgatggaccctagagtcctccaacaaatgggcggcatggcaggtttgcaaaatatgatgagacaactccaagcaggcgcagctggtggtttagggggcttaggtaatcttatggggggctttgg

SEQ ID NO: 605 - DNA, 226 bp, Diabrotica virgifera
  misc_feature (1)..(226): RNAi target sequence DV-SRP54-FRAG3
gtagcacaaggatctggtgtaacagaaagagaagtaaaagatctcattacgcagtacacaaaattcgcagcggtggtaaagaaaatgggaggcatcaaaggtctcttcaaaggtggcgatatggctaaaaacgtcaaccacaaccagatggcgaaacttaatcaacaaatggccaaaatgatggaccctagagtcctccaacaaatgggcggcatggcaggtttgc

SEQ ID NO: 606 - DNA, 163 bp, Diabrotica virgifera
  misc_feature (1)..(163): RNAi target sequence DV-SRP54-FRAG4
ttatcagaaaaagaactggaaatcatgtttggtatgtgcagatacattcagagctggtgcctacgatcaggtaaaacagaactgtacaaaagctaggatacccttttatggaagttacacagaagttgatcctgtagtcatagcccaggatggtgttgatatg

SEQ ID NO: 607 - DNA, 171 bp, Diabrotica virgifera
  misc_feature (1)..(171): RNAi target sequence DV-TIF3-FRAG1
gttgagtgctgtttctggagaagatgcccaagaccgttcagatcgtacaattcttactccgtgggttaagttcctttgggaatcttactgtcaatgtttggaacttttgcgtacaaatgcacatgttgagaacttgtatcatgatatagccaggatggctttccagttttg

SEQ ID NO: 608 - DNA, 232 bp, Diabrotica virgifera
  misc_feature (1)..(232): RNAi target sequence DV-TIF3-FRAG2
atcgtggggatcgcagggacgatagggagaggagagacgacagggataacagggataggagagacgacagagatcgtagagatgatagggataggagagacgacagggagcgtagagatgatagagagagaagagatgaccgtggcggaagagatgataaccgggaccgccgagacgatcgtgatcgtagagacgacagggaccgaagaggcggggacgaaggtacttggcg

SEQ ID NO: 609 - DNA, 166 bp, Diabrotica virgifera
  misc_feature (1)..(166): RNAi target sequence DV-TIF3-FRAG3
ggcaaccgcgacagcggaagatttggcgacagagacagagaaggtggtgtcagattcacgagagataatcgggataatcgtggggatcgcagggacgatagggagaggagagacgacagggataacagggataggagagacgacagagatcgtagagatgataggg

SEQ ID NO: 610 - DNA, 239 bp, Diabrotica virgifera
  misc_feature (1)..(239): RNAi target sequence DV-TIF3-FRAG4
gcaagtccacaactacaagatttgtacaattggctggaagtggagttccatcctttactattgtgtcagagagtgcatgaggtaatcaaatctctcgaatctgaagaaaatgcagccctccaacaatatgtgccagctttacaagatgtaactctggtgcgtctagtgagacagatagcacaagtctatcagaccatagaatttgctaggttgatccagattgccaaatttactacacc

SEQ ID NO: 611 - DNA, 227 bp, Diabrotica virgifera
  misc_feature (1)..(227): RNAi target sequence DV-TIF3-FRAG5
ggttgattgtgtgagacacaatgatatgcaaattcgtattgatcatggcaaagactgtatccactttggaatggacctgagtgaaagccaaagagaggacaaaccagagggacccactttgcaagttatgcctagtgagcaagtcagaaatcaacttattaacatgtctactgtattgaatcaagccatacaagtcattaatcctaataagaagaagcttgaacgcg

SEQ ID NO: 612 - DNA, 224 bp, Diabrotica virgifera
  misc_feature (1)..(224): RNAi target sequence DV-TIF3-FRAG6
tgttataagagggtatttgcggatggcagaagaaagaacagagaatgctagagaacagtcagcacaagcagttattgatatcgatgatttagataatttggctacacctgaaagtatattgttgagtgctgtttctggagaagatgcccaagaccgttcagatcgtacaattcttactccgtgggttaagttcctttgggaatcttactgtcaatgtttggaac

SEQ ID NO: 613 - DNA, 154 bp, Diabrotica virgifera
  misc_feature (1)..(154): RNAi target sequence DV-TIF3-FRAG7
aagactgtatccactttggaatggacctgagtgaaagccaaagagaggacaaaccagagggacccactttgcaagttatgcctagtgagcaagtcagaaatcaacttattaacatgtctactgtattgaatcaagccatacaagtcattaatcc

SEQ ID NO: 614 - DNA, 742 bp, Diabrotica virgifera
  misc_feature (1)..(742): RNAi target sequence DV-TIF3-FRAG8
ctggcaagtccacaactacaagatttgtacaattggctggaagtggagttccatcctttactattgtgtcagagagtgcatgaggtaatcaaatctctcgaatctgaagaaaatgcagccctccaacaatatgtgccagctttacaagatgtaactctggtgcgtctagtgagacagatagcacaagtctatcagaccatagaatttgctaggttgatccagattgccaaatttactacaccttttcatctggagagacttttggttgattgtgtgagacacaatgatatgcaaattcgtattgatcatggcaaagactgtatccactttggaatggacctgagtgaaagccaaagagaggacaaaccagagggacccactttgcaagttatgcctagtgagcaagtcagaaatcaacttattaacatgtctactgtattgaatcaagccatacaagtcattaatcctaataagaagaagcttgaacgcgaaaaacttagagctgttatggttcagaattatcacgaaacaaaggttagagaacaccagaaaattttacaaagacacaagattattgaggacagaaaggaatatattgagcgtttgaatacagtcagggaagaagaggagcagaaaagattggaagaaatgcaacggcagcacttactggccgaacaaaaacgattggaccaagaaagagaagaaagagagcggaaacgtgctctaaatgaaatccagcagg

SEQ ID NO: 615 - DNA, 619 bp, Diabrotica virgifera
  misc_feature (1)..(619): RNAi target sequence DV-TIF3-FRAG9
ccaacaatatgtgccagctttacaagatgtaactctggtgcgtctagtgagacagatagcacaagtctatcagaccatagaatttgctaggttgatccagattgccaaatttactacaccttttcatctggagagacttttggttgattgtgtgagacacaatgatatgcaaattcgtattgatcatggcaaagactgtatccactttggaatggacctgagtgaaagccaaagagaggacaaaccagagggacccactttgcaagttatgcctagtgagcaagtcagaaatcaacttattaacatgtctactgtattgaatcaagccatacaagtcattaatcctaataagaagaagcttgaacgcgaaaaacttagagctgttatggttcagaattatcacgaaacaaaggttagagaacaccagaaaattttacaaagacacaagattattgaggacagaaaggaatatattgagcgtttgaatacagtcagggaagaagaggagcagaaaagattggaagaaatgcaacggcagcacttactggccgaacaaaaacgattggaccaagaaagagaagaaagagagcggaaacgtgctctaaatgaaatccagcag

SEQ ID NO: 616 - DNA, 713 bp, Diabrotica virgifera
  misc_feature (1)..(713): RNAi target sequence DV-EIF-4A-FRAG2
cgtctagcacatcgtttggcatggtagccgaaagtaaaattacctgtacgtcagtgttcaacattttgaacacgtcatgaatttgatctttaaaaccccttgacaacatttcatcggcttcatccaaaacaaacatttttatatgagtcggccttaaggctctccttgttatcatatcataaactctaccaggtgtaccaactacaacatgtacgccagtttcaagttttcttatgtcttctcgtacattggtaccaccaatacatgcatgacactgcgctgacatgaaatctcctagggcaattactactttttggatctgttgagccaattcacgagttggtgccaatataagagcttggcactccctcactgacgtgtcaatttgttgtaaaatagagatggagaatgttgcagtcttaccagtacctgactgagcctgagcaataacatcgtgtccctttacacaaggaatgatggctctctgttggatagcagaaggtttttcaaaaccataggcataaattcctcttaaaagttcctcttttaggttcatgtcgtcgaaattatcgaccacctcttcccagttggattcaataatgccatcaggctccatacctggtgggccgtcatagccttggggctggctgtcttcattagctgggccattcttgtcccactcttcacgacgatctggcatagacatgtctact

SEQ ID NO: 617 - DNA, 200 bp, Diabrotica virgifera
  misc_feature (1)..(200): RNAi target sequence DV-EIF-4A-FRAG3
tctatgccagatcgtcgtgaagagtgggacaagaatggcccagctaatgaagacagccagccccaaggctatgacggcccaccaggtatggagcctgatggcattattgaatccaactgggaagaggtggtcgataatttcgacgacatgaacctaaaagaggaacttttaagaggaatttatgcctatggttttgaaaa

SEQ ID NO: 618 - DNA, 270 bp, Diabrotica virgifera
  misc_feature (1)..(270): RNAi target sequence DV-PAT3-SS1
tcaacattgataaacacataggaatggcattttcaggcttaatagctgatgcaaggcaaatcgttgagattgctagaaaagaagcatcaaattatagacatcaatatggttcaaatattcctcttaaatacctaaatgatagagtaagcatgtacatgcatgcatacactttatacagtgctgttagaccatttggttgcagtgtcatcttggccagttatgaagatagtgacccatctatgtatctgattgatccatctggagttagct

SEQ ID NO: 619 - DNA, 322 bp, Diabrotica virgifera
  misc_feature (1)..(322): RNAi target sequence DV-PAT3-FRAG5
ggggagtcgtcaacatcaatttcaagtttcaagaaaaagcaaatcactacgacttgccggattttgtagtagtgttaattttgtattaaaaaatcaaaatgagttctattggaactgggtacgatttatcagcttcccaattctctcctgatggaagagtatttcaagttgaatatgcaatgaaagcagttgaaaatagtggcaccgtaataggcctccgaggtacagatggcattgtattggctgctgaaaagctcattatgtcaaaattgcatgaaccaagtacaaataaacgaattttcaacattgataaacacatagg

SEQ ID NO: 620 - DNA, 322 bp, Diabrotica virgifera
  misc_feature (1)..(322): RNAi target sequence DV-PAT3-FRAG6
aatggcattttcaggcttaatagctgatgcaaggcaaatcgttgagattgctagaaaagaagcatcaaattatagacatcaatatggttcaaatattcctcttaaatacctaaatgatagagtaagcatgtacatgcatgcatacactttatacagtgctgttagaccatttggttgcagtgtcatcttggccagttatgaagatagtgacccatctatgtatctgattgatccatctggagttagctatggatactttggatgtgctacaggtaaagcaaaacagtctgcaaagactgaaatagaaaaattgaagatgggg

SEQ ID NO: 621 - DNA, 161 bp, Diabrotica virgifera
  misc_feature (1)..(161): RNAi target sequence DV-PAT3-FRAG7
ggggagtcgtcaacatcaatttcaagtttcaagaaaaagcaaatcactacgacttgccggattttgtagtagtgttaattttgtattaaaaaatcaaaatgagttctattggaactgggtacgatttatcagcttcccaattctctcctgatggaagagta

SEQ ID NO: 622 - DNA, 161 bp, Diabrotica virgifera
  misc_feature (1)..(161): RNAi target sequence DV-PAT3-FRAG8
tttcaagttgaatatgcaatgaaagcagttgaaaatagtggcaccgtaataggcctccgaggtacagatggcattgtattggctgctgaaaagctcattatgtcaaaattgcatgaaccaagtacaaataaacgaattttcaacattgataaacacatagg

SEQ ID NO: 623 - DNA, 161 bp, Diabrotica virgifera
  misc_feature (1)..(161): RNAi target sequence DV-PAT3-FRAG9
aatggcattttcaggcttaatagctgatgcaaggcaaatcgttgagattgctagaaaagaagcatcaaattatagacatcaatatggttcaaatattcctcttaaatacctaaatgatagagtaagcatgtacatgcatgcatacactttatacagtgctg

SEQ ID NO: 624 - DNA, 161 bp, Diabrotica virgifera
  misc_feature (1)..(161): RNAi target sequence DV-PAT3-FRAG10
ttagaccatttggttgcagtgtcatcttggccagttatgaagatagtgacccatctatgtatctgattgatccatctggagttagctatggatactttggatgtgctacaggtaaagcaaaacagtctgcaaagactgaaatagaaaaattgaagatgggg

SEQ ID NO: 625 - DNA, 162 bp, Diabrotica virgifera
  misc_feature (1)..(162): RNAi target sequence DV-PAT3-FRAG11
ttgtattaaaaaatcaaaatgagttctattggaactgggtacgatttatcagcttcccaattctctcctgatggaagagtatttcaagttgaatatgcaatgaaagcagttgaaaatagtggcaccgtaataggcctccgaggtacagatggcattgtattg

SEQ ID NO: 626 - DNA, 160 bp, Diabrotica virgifera
  misc_feature (1)..(160): RNAi target sequence DV-PAT3-FRAG12
gctgctgaaaagctcattatgtcaaaattgcatgaaccaagtacaaataaacgaattttcaacattgataaacacataggaatggcattttcaggcttaatagctgatgcaaggcaaatcgttgagattgctagaaaagaagcatcaaattatagacatc

SEQ ID NO: 627 - DNA, 161 bp, Diabrotica virgifera
  misc_feature (1)..(161): RNAi target sequence DV-PAT3-FRAG13
aatatggttcaaatattcctcttaaatacctaaatgatagagtaagcatgtacatgcatgcatacactttatacagtgctgttagaccatttggttgcagtgtcatcttggccagttatgaagatagtgacccatctatgtatctgattgatccatctgga

SEQ ID NO: 628 - DNA, 80 bp, Diabrotica virgifera
  misc_feature (1)..(80): RNAi target sequence DV-PAT3-FRAG14
ggggagtcgtcaacatcaatttcaagtttcaagaaaaagcaaatcactacgacttgccggattttgtagtagtgttaatt

SEQ ID NO: 629 - DNA, 81 bp, Diabrotica virgifera
  misc_feature (1)..(81): RNAi target sequence DV-PAT3-FRAG15
ttgtattaaaaaatcaaaatgagttctattggaactgggtacgatttatcagcttcccaattctctcctgatggaagagta

SEQ ID NO: 630 - DNA, 80 bp, Diabrotica virgifera
  misc_feature (1)..(80): RNAi target sequence DV-PAT3-FRAG16
tttcaagttgaatatgcaatgaaagcagttgaaaatagtggcaccgtaataggcctccgaggtacagatggcattgtatt

SEQ ID NO: 631 - DNA, 81 bp, Diabrotica virgifera
  misc_feature (1)..(81): RNAi target sequence DV-PAT3-FRAG17
ggctgctgaaaagctcattatgtcaaaattgcatgaaccaagtacaaataaacgaattttcaacattgataaacacatagg

SEQ ID NO: 632 - DNA, 80 bp, Diabrotica virgifera
  misc_feature (1)..(80): RNAi target sequence DV-PAT3-FRAG18
aatggcattttcaggcttaatagctgatgcaaggcaaatcgttgagattgctagaaaagaagcatcaaattatagacatc

SEQ ID NO: 633 - DNA, 81 bp, Diabrotica virgifera
  misc_feature (1)..(81): RNAi target sequence DV-PAT3-FRAG19
aatatggttcaaatattcctcttaaatacctaaatgatagagtaagcatgtacatgcatgcatacactttatacagtgctg

SEQ ID NO: 634 - DNA, 80 bp, Diabrotica virgifera
  misc_feature (1)..(80): RNAi target sequence DV-PAT3-FRAG20
ttagaccatttggttgcagtgtcatcttggccagttatgaagatagtgacccatctatgtatctgattgatccatctgga

SEQ ID NO: 635 - DNA, 81 bp, Diabrotica virgifera
  misc_feature (1)..(81): RNAi target sequence DV-PAT3-FRAG21
gttagctatggatactttggatgtgctacaggtaaagcaaaacagtctgcaaagactgaaatagaaaaattgaagatgggg

SEQ ID NO: 636 - DNA, 644 bp, Diabrotica virgifera
  misc_feature (1)..(644): RNAi target sequence DV-PAT3-FIS (TR)
ggggagtcgtcaacatcaatttcaagtttcaagaaaaagcaaatcactacgacttgccggattttgtagtagtgttaattttgtattaaaaaatcaaaatgagttctattggaactgggtacgatttatcagcttcccaattctctcctgatggaagagtatttcaagttgaatatgcaatgaaagcagttgaaaatagtggcaccgtaataggcctccgaggtacagatggcattgtattggctgctgaaaagctcattatgtcaaaattgcatgaaccaagtacaaataaacgaattttcaacattgataaacacataggaatggcattttcaggcttaatagctgatgcaaggcaaatcgttgagattgctagaaaagaagcatcaaattatagacatcaatatggttcaaatattcctcttaaatacctaaatgatagagtaagcatgtacatgcatgcatacactttatacagtgctgttagaccatttggttgcagtgtcatcttggccagttatgaagatagtgacccatctatgtatctgattgatccatctggagttagctatggatactttggatgtgctacaggtaaagcaaaacagtctgcaaagactgaaatagaaaaattgaagatgggg

SEQ ID NO: 637 - DNA, 367 bp, Diabrotica virgifera
  misc_feature (1)..(367): RNAi target sequence DV-PAT3-FRAG22
aatctaacatgcaaagaacttgttaaagaagcagccaaaatcatttatttggtccatgatgagctgaaggataagaattttgaactggaactttcatgggtatgcaaagatacgaatggtttacataccaaagtgcctgaatcagtgtttgctgatgcagaaaaagctgccaaacaaatggaagcagattcagaatcagatacagaagatatgtaataactacatttagtttttaatatttcgctgatggtggctgttcttacaatatttcgtgtgttatgttcatatattatgtaatactgtgagaatttccatttcaaggataggtttataacttttttttctaataaatacataactttatgtc

SEQ ID NO: 638 - DNA, 182 bp, Diabrotica virgifera
  misc_feature (1)..(182): RNAi target sequence DV-PAT3-FRAG23
aatctaacatgcaaagaacttgttaaagaagcagccaaaatcatttatttggtccatgatgagctgaaggataagaattttgaactggaactttcatgggtatgcaaagatacgaatggtttacataccaaagtgcctgaatcagtgtttgctgatgcagaaaaagctgccaaacaaatgga

SEQ ID NO: 639 - DNA, 185 bp, Diabrotica virgifera
  misc_feature (1)..(185): RNAi target sequence DV-PAT3-FRAG24
agcagattcagaatcagatacagaagatatgtaataactacatttagtttttaatatttcgctgatggtggctgttcttacaatatttcgtgtgttatgttcatatattatgtaatactgtgagaatttccatttcaaggataggtttataacttttttttctaataaatacataactttatgtc

SEQ ID NO: 640 - DNA, 256 bp, Diabrotica virgifera
  misc_feature (1)..(256): RNAi target sequence DV-PAT5-FRAG1
atcaagaacatttgttcagtttgacgcaaaggcgataggatcaggatccgagggtgcacagcaaagtttacaggaggcatatcatcgcagtatgaccctggaagaagctaccacaactgctttaacaattctaaaacaagttatggaagaaaagttgaattcttcaaatgttgaggttatgactatgactccaaaagatatgttccacatgttcacaaaggaacaagtggaagaggtaattgctaaattgtcttaa

SEQ ID NO: 641 - DNA, 200 bp, Diabrotica virgifera
  misc_feature (1)..(200): RNAi target sequence DV-PAT6-FRAG1
aatcatgtctagaggaagcagtgcaggttttgaccgacacataacaattttctcgcccgaaggccgactctatcaagtagagtatgcttttaaagccattaaccaagccggccccacttcggtagcagtccgaggagtagatgctgcggcgtgtgtgacccagagaaagatcccggataagctgattgatcccaacacaa

SEQ ID NO: 642 - DNA, 216 bp, Diabrotica virgifera
  misc_feature (1)..(216): RNAi target sequence DV-PAT6-FRAG2
cagaacacactggatgtgtgatgactggcatgattgctgacagcaagtcccaggtgcagagagctagatatgaggctgccgagttcaaatataagtttggatatgagatgccaatcgatgccttgtgtaggagagtatcggatatttcccaggtttatacgcagaatgctgagatgagacctttgggttgctccatgcttctgataggatatgacc

SEQ ID NO: 643 - DNA, 200 bp, Diabrotica virgifera
  misc_feature (1)..(200): RNAi target sequence DV-PAT6-FRAG3
cacatctgttccagttaacagaacacactggatgtgtgatgactggcatgattgctgacagcaagtcccaggtgcagagagctagatatgaggctgccgagttcaaatataagtttggatatgagatgccaatcgatgccttgtgtaggagagtatcggatatttcccaggtttatacgcagaatgctgagatgagacct

SEQ ID NO: 644 - DNA, 195 bp, Diabrotica virgifera
  misc_feature (1)..(195): RNAi target sequence DV-PAT6-FRAG4
aggagagtatcggatatttcccaggtttatacgcagaatgctgagatgagacctttgggttgctccatgcttctgataggatatgaccaagaaatgggaccatgtgtccacaaagctgaccctgctggctattactgtggctacagagcagtaagtgtaggatccaaacaaactgaagccaacagctacctagag

SEQ ID NO: 645 - DNA, 199 bp, Diabrotica virgifera
  misc_feature (1)..(199): RNAi target sequence DV-PAT6-FRAG5
aagaagctaaagaagaaaactgatctgtccaaagatgaagtcatccaattggcaatcagttgtctttcaagtgttttatctgtagattttaaaccaacagaagtcgaagttggggttgttactaaggatgagcccaagtttaggaaattgacggaacaagaaatagatttccatctgacagctattgctgagagggatt

SEQ ID NO: 646 - DNA, 165 bp, Diabrotica virgifera
  misc_feature (1)..(165): RNAi target sequence DV-PAT6-FRAG6
aggagagtatcggatatttcccaggtttatacgcagaatgctgagatgagacctttgggttgctccatgcttctgataggatatgaccaagaaatgggaccatgtgtccacaaagctgaccctgctggctattactgtggctacagagcagtaagtgtaggatcc

SEQ ID NO: 647 - DNA, 157 bp, Diabrotica virgifera
  misc_feature (1)..(157): RNAi target sequence DV-PAT6-FRAG7
gagaagaagctaaagaagaaaactgatctgtccaaagatgaagtcatccaattggcaatcagttgtctttcaagtgttttatctgtagattttaaaccaacagaagtcgaagttggggttgttactaaggatgagcccaagtttaggaaattgacgg

SEQ ID NO: 648 - DNA, 196 bp, Diabrotica virgifera
  misc_feature (1)..(196): RNAi target sequence DV-BETA2-FRAG1
gcactcagaagcagaagtgcataccatgtaaaccttcttctagctggatatgatgacaaagaaggtcctcagctatattacatggactacctagcatccatagcaagcgttgattatgctgctcatggttatggaggattcttttcactgtcaattatggatcgtaattatcggcagaaccttagtaaagaagaag

SEQ ID NO: 649 - DNA, 187 bp, Diabrotica virgifera
  misc_feature (1)..(187): RNAi target sequence DV-BETA2-FRAG2
tttcactgtcaattatggatcgtaattatcggcagaaccttagtaaagaagaaggttacgaacttttgaaaaaatgtgtgaaagaagttcagaaaagattgatcatcaatttgcctaactttaaggtgcagtgtgttgataaaaatggcatccaggatatgcctaatatcactgctaaggatttggt

SEQ ID NO: 650 - DNA, 155 bp, Diabrotica virgifera
  misc_feature (1)..(155): RNAi target sequence DV-BETA2-FRAG3
cagatgcactcagaagcagaagtgcataccatgtaaaccttcttctagctggatatgatgacaaagaaggtcctcagctatattacatggactacctagcatccatagcaagcgttgattatgctgctcatggttatggaggattcttttcactg

SEQ ID NO: 651 - DNA, 174 bp, Diabrotica virgifera
  misc_feature (1)..(174): RNAi target sequence DV-BETA3-FRAG1
tgtgaagcactttgggagcctaacctaggacctgaggatctttttgaaaccatctctcaagctctcatcaatgcctttgacagagatgccatttctggttggggagctacagtgtacatcatagaaaaaaataaggtgactgtaaaaaatttgaagacacgtatggactagtta

SEQ ID NO: 652 - DNA, 203 bp, Diabrotica virgifera
  misc_feature (1)..(203): RNAi target sequence DV-PROTB-FRAG1
taccagagaacaaaacaaacttttcccactatcaggcactactgttttgggttgtgcaggatgttggtgtgacactctaacattaaccagaatccttaaatctcgcatgcagatgtaccaacaagagcataacaaaacaatgtctacaactgcatgtgcccagatgttgtcaaccatgctctactacaagagattctttcctt

SEQ ID NO: 653 - DNA, 291 bp, Diabrotica virgifera
  misc_feature (1)..(291): RNAi target sequence DV-PBT6.2-FRAG1
tatagtgtaaaactgatttttttattttaatatataccaaaacataccaaagcttaaaaaataatcaattaaccttcataaaatttgggcaattcatttcctaaaacaactcttcgttcaataccagcttcagtgatgatccccagtctgactacacctcctgaagaaccatctcttgacatggcaagtgccaatgtatttgtgacaaacttcacacattcttccttgctcatattgggcttgaagttggcatctacgtaaccataaacataactggaacctgatcctccg

SEQ ID NO: 654 - DNA, 277 bp, Diabrotica virgifera
  misc_feature (1)..(277): RNAi target sequence DV-PBT6.2-FRAG2
attgacacttcttgtctaacacacatcccaccaattggtatggaatatacttgtccgcctttctttttatcccaacctgctaccagtataccagccattagcgaatctctataattgtagcaaagttcttggaaaatggcggcacctacttgtactttgggttcttcaccaagttccataccatgaaaattaagatgataagcaacaatgtctgcaattgcttgtgtatctgctgcagatcctgaacgacaacagtatatatggtcagtgactttgg

SEQ ID NO: 655 - DNA, 257 bp, Diabrotica virgifera
  misc_feature (1)..(257): RNAi target sequence DV-PBT6.2-FRAG3
tgagtttgtctgctacccggtttgcaatgtaggccccagtagttgtgcgagaatctgctcctataacaacgcctccatcaaactccgcggccataatagaggttcctgtactgtgagcggcatctctccaatcattaggaccagtcattgcaccatactcagtcataagaggcattttttacaagtttaatgaaaagaatacaagcttagaaaaattacacttgtaatcctgcaatgcaatattttgccagtccccc

SEQ ID NO: 656 - DNA, 273 bp, Diabrotica virgifera
  misc_feature (1)..(273): RNAi target sequence DV-PBT6.2-FRAG4
caggaacctctattatggccgcggagtttgatggaggcgttgttataggagcagattctcgcacaactactggggcctacattgcaaaccgggtagcagacaaactcaccaaagtcactgaccatatatactgttgtcgttcaggatctgcagcagatacacaagcaattgcagacattgttgcttatcatcttaattttcatggtatggaacttggtgaagaacccaaagtacaagtaggtgccgccattttccaagaactttgctacaatt

SEQ ID NO: 657 - DNA, 219 bp, Diabrotica virgifera
  misc_feature (1)..(219): RNAi target sequence DV-PBT6.2-FRAG5
ggctggtatactggtagcaggttgggataaaaagaaaggcggacaagtatattccataccaattggtgggatgtgtgttagacaagaagtgtcaatcggaggatcaggttccagttatgtttatggttacgtagatgccaacttcaagcccaatatgagcaaggaagaatgtgtgaagtttgtcacaaatacattggcacttgccatgtcaagagatgg

SEQ ID NO: 658 - DNA, 151 bp, Diabrotica virgifera
  misc_feature (1)..(151): RNAi target sequence DV-PBT6.2-FRAG6
ttagacaagaagtgtcaatcggaggatcaggttccagttatgtttatggttacgtagatgccaacttcaagcccaatatgagcaaggaagaatgtgtgaagtttgtcacaaatacattggcacttgccatgtcaagagatggttcttcagg

SEQ ID NO: 659 - DNA, 229 bp, Diabrotica virgifera
  misc_feature (1)..(229): RNAi target sequence DV-BETA7-FRAG1
ggctacagttttgtgtccagaaataccaacgcctggtttttcattcgaaaattgtaaaagaaatgcacttctggaaaataagggccttgctcttccaaaagccactaaaacaggtactacgatcgtaggaatagtctacaaagatggaattattcttggagcagatactagagctacagaagacaccacagttgcagacaagaactgtgaaaagattcacttccttgca

SEQ ID NO: 660 - DNA, 285 bp, Diabrotica virgifera
  misc_feature (1)..(285): RNAi target sequence DV-BETA7-FRAG2
gctaaattagaactccacagattatacacaaaccgagttactagagtgtgtacagcaaaccaattgttaaaacaatatctatttcgctaccagggatatattggggctgctttaatcctgggtggtgttgatattgaaggaccacatctatatatgatttatccacatggatccagtgttgatcttccttatgctacaatgggttctggttccttagcagccatatctgtctttgaatcccgctggaagcctcaaatggaagaggaagatggtgtccaactagta

SEQ ID NO: 661 - DNA, 188 bp, Diabrotica virgifera
  misc_feature (1)..(188): RNAi target sequence DV-BETA7-FRAG3
agacatctgtgtaataagaaagggttcagtagactacaaacgaacctatgacgaggctaacaaaaagggagttaaacaaggatcttatagatatcaaagaggaaccactgcagtgcttagtacccaggtggtggatgttgaggaagtctcagtgattcccattgaagctgaagaaatggatgttgctt

SEQ ID NO: 662 - DNA, 150 bp, Diabrotica virgifera
  misc_feature (1)..(150): RNAi target sequence DV-BETA7-FRAG4
aaggaccacatctatatatgatttatccacatggatccagtgttgatcttccttatgctacaatgggttctggttccttagcagccatatctgtctttgaatcccgctggaagcctcaaatggaagaggaagatggtgtccaactagtaa

SEQ ID NO: 663 - DNA, 168 bp, Diabrotica virgifera
  misc_feature (1)..(168): RNAi target sequence DV-BETA7-FRAG5
cattcgaaaattgtaaaagaaatgcacttctggaaaataagggccttgctcttccaaaagccactaaaacaggtactacgatcgtaggaatagtctacaaagatggaattattcttggagcagatactagagctacagaagacaccacagttgcagacaagaactgtg

SEQ ID NO: 664 - DNA, 156 bp, Diabrotica virgifera
  misc_feature (1)..(156): RNAi target sequence DV-BETA7-FRAG6
gctaaattagaactccacagattatacacaaaccgagttactagagtgtgtacagcaaaccaattgttaaaacaatatctatttcgctaccagggatatattggggctgctttaatcctgggtggtgttgatattgaaggaccacatctatatatg

SEQ ID NO: 665 - DNA, 220 bp, Diabrotica virgifera
  misc_feature (1)..(220): RNAi target sequence DV-NATP1-FRAG1
tgaatatcacatctgcagcgggaattatttccctcttggatgaaccaagaccagaattaaaagtatttgcactgaagaaactagattccatagtgggtgagttttggccggagatctcagaagctatcgaaaaaatcgaaattttgcatgaagacaaagttttccagcaacaccagttagctgcacttgtggcaagtaaggtatattaccatttaggcgc

SEQ ID NO: 666 - DNA, 222 bp, Diabrotica virgifera
  misc_feature (1)..(222): RNAi target sequence DV-NATP1-FRAG2
ttttgaagactctttaacttatgctcttggtgcgggtgatctctttgatgtcaatgcccggagtgagtatgtagaaactattctagctaaatgtatcgactattacactcagcaacgtattgctgtagctgaaggattggcagatgccaaacccatagactctcgccttgaagctattgttaatcgaatgtttcagaggtgtcttgatgatggtcaatatcg

SEQ ID NO: 667 - DNA, 204 bp, Diabrotica virgifera
  misc_feature (1)..(204): RNAi target sequence DV-NATP1-FRAG3
tcaagctatgggcctggctctagaaaccagacgaatggatatctttgagtcatctattactcagtctgatgatattatcagcatgttgacttatgcatttcaagtagcgatgagtttgattcaaaatcgagcatttagaaacactgttttgagatctcttgttggactttatagaggactggttacacctgattacgttaatat

SEQ ID NO: 668 - DNA, 155 bp, Diabrotica virgifera
  misc_feature (1)..(155): RNAi target sequence DV-NATP1-FRAG4
tgtatcgactattacactcagcaacgtattgctgtagctgaaggattggcagatgccaaacccatagactctcgccttgaagctattgttaatcgaatgtttcagaggtgtcttgatgatggtcaatatcgtcaagctatgggcctggctctaga

SEQ ID NO: 669 - DNA, 226 bp, Diabrotica virgifera
  misc_feature (1)..(226): RNAi target sequence DV-NATP1-FRAG5
attaacactaatgcaaagttacttgccgaaagaagttggacccagctcaggttattccgaagggggcggcctttatgctcttggtcttatacatgccaaccatggtacaaatatcattgattaccttcttggacaacttaaggatgcacagaatgagatggtgagacatggaggttgtcttggtctaggtttggctgctatgggcactcatagacaggatgtttat

SEQ ID NO: 670 - DNA, 205 bp, Diabrotica virgifera
  misc_feature (1)..(205): RNAi target sequence DV-NATP1-FRAG6
gaacaactcaaattcaatttataccaagatgatgccaatactggtgaagcagctggtattgcaatgggaatggtaatgttgggttcaagtaattctaccacaattatggatatggttgcatacgcacaagagagtcaacatgagaaaattcttagaggcttagctgttggtattagtttttccatgtatggtagattagaagaag

SEQ ID NO: 671 - DNA, 236 bp, Diabrotica virgifera
  misc_feature (1)..(236): RNAi target sequence DV-NATP1-FRAG7
cagatccactgattcaacaacttacctctgataaagatcctatcctcagaagatcaggaatgtatactttgggtatggcatattgtggtactggacacaaccaagcaattagaaaactacttcatgtagctgtgtcagatgtcaacgatgatgttagaagagctgcagttacagctttaggttttctgttattcagaactcctgaacaatgtcctagtgtagtatcccttctagct

SEQ ID NO: 672 - DNA, 200 bp, Diabrotica virgifera
  misc_feature (1)..(200): RNAi target sequence DV-NATP1-FRAG8
gtatggtagattagaagaagcagatccactgattcaacaacttacctctgataaagatcctatcctcagaagatcaggaatgtatactttgggtatggcatattgtggtactggacacaaccaagcaattagaaaactacttcatgtagctgtgtcagatgtcaacgatgatgttagaagagctgcagttacagctttag

SEQ ID NO: 673 - DNA, 199 bp, Diabrotica virgifera
  misc_feature (1)..(199): RNAi target sequence DV-NATP2-FRAG1
tgggcgatacaaaggtagaacctacaaaggtggataaaacaaaggggactgaggacaaaaacaaaaatgaactgtcggaagaagacaaacagcttcaagatgaattaaatttgtgtgttgagaaactccaggataacgatgaaaagagatacctacttgctttgcaagctttatcaaatcatattcaagcctcaactac

SEQ ID NO: 674 - DNA, 198 bp, Diabrotica virgifera
  misc_feature (1)..(198): RNAi target sequence DV-NATP2-FRAG2
gcctcaactacttcgatgacttctgttcctaagccgttaaaatttatgaggccccattacgaaaccatgaagacagtacatgaaaaaattactgatcctgatactaaaaaagtctgtgcagatattatatctgttttagctatgacaatgggagaaggcagagaatgtttgaaataccgtcttctttctaatttggat

SEQ ID NO: 675 - DNA, 190 bp, Diabrotica virgifera
  misc_feature (1)..(190): RNAi target sequence DV-NATP2-FRAG3
acatctaccatagagtgtgcttatatctcaccagctgtgtaccctatgtggcagatcctgagaatactactctactgcagactgctcttttactgtttagaaagtttgatcagtatccccaggcactgagattagcaatgcagttaaatgactttggattaattgaagaaatttttgtcaactgcccaga

SEQ ID NO: 676 - DNA, 223 bp, Diabrotica virgifera
  misc_feature (1)..(223): RNAi target sequence DV-NATP2-FRAG4
cggacgtacaaaaacaactggcatttatgctaggacgacaacagatatatgttgaaattcctgagcatacgcctgaatacgaagatctaatcgagataatggcaaactgtcatcttaataaccacttcttgaacctcgctcgcgagttggacattatggatcctaaaacccccgaagacgtttacaaatcccatttagaaaatagtcgtcctccatttggtgg

SEQ ID NO: 677 - DNA, 165 bp, Diabrotica virgifera
  misc_feature (1)..(165): RNAi target sequence DV-NATP2-FRAG5
tgctaggacgacaacagatatatgttgaaattcctgagcatacgcctgaatacgaagatctaatcgagataatggcaaactgtcatcttaataaccacttcttgaacctcgctcgcgagttggacattatggatcctaaaacccccgaagacgtttacaaatccc

SEQ ID NO: 678 - DNA, 156 bp, Diabrotica virgifera
  misc_feature (1)..(156): RNAi target sequence DV-NATP2-FRAG6
catctaccatagagtgtgcttatatctcaccagctgtgtaccctatgtggcagatcctgagaatactactctactgcagactgctcttttactgtttagaaagtttgatcagtatccccaggcactgagattagcaatgcagttaaatgactttgg

SEQ ID NO: 679 - DNA, 222 bp, Diabrotica virgifera
  misc_feature (1)..(222): RNAi target sequence DV-NATP3-FRAG1
cttgtgcaggccatgagaaaagcaccccagaatgctgccattggtttcagacaggttgttcaaaagcttactgttgtagttgaactactgctaggagatataccagaacgacagatttttagacaatctagtatgaggcactcccttgccccatactttcaactaacacaagcagttagaatgggcaatttgcaaagatttggtgaggtgttagagaacttc

SEQ ID NO: 680 - DNA, 222 bp, Diabrotica virgifera
  misc_feature (1)..(222): RNAi target sequence DV-NATP3-FRAG2
ggcccacaatttagacaagatcatacatttacactaattttgagactgcgccacaatgttattaaaacagctataagatccataggattatcatactccagaatatctccccaagacatagctaagaaactggggctggattcagctgaagatgcagaatttatagtagcaaaagcaatcagagatggggtgatagaagctacacttgatccacagggaggt

SEQ ID NO: 681 - DNA, 159 bp, Diabrotica virgifera
  misc_feature (1)..(159): RNAi target sequence DV-NATP3-FRAG3
caatctagtatgaggcactcccttgccccatactttcaactaacacaagcagttagaatgggcaatttgcaaagatttggtgaggtgttagagaacttcggcccacaatttagacaagatcatacatttacactaattttgagactgcgccacaatgtt

SEQ ID NO: 682 - DNA, 161 bp, Diabrotica virgifera
  misc_feature (1)..(161): RNAi target sequence DV-NATP7-FRAG1
ctttagttagatctattgtcgctctacacaatcttattaacaacaaactaacaaatagagacgcggaagaaggaaaaaaggaggatagtaagaaagaaagcaaagataaggacaaggataaagagaaggaaaaggataaagatgctaagaaggacgagaag

SEQ ID NO: 683 - DNA, 151 bp, Diabrotica virgifera
  misc_feature (1)..(151): RNAi target sequence DV-NATP8-FRAG1
ttgccaaaaaggctttccagctcaaaccgtggaagctcaacaatgactttttccactttcttcctgaagagaagacccacgaacccataccctcacaggaactggcacagcaggctatagagtatgccaaggaacttgaaatgattgtcta

SEQ ID NO: 684 - DNA, 163 bp, Diabrotica virgifera
  misc_feature (1)..(163): RNAi target sequence DV-NATP8-FRAG2
gctggacaccataagagaagaaattgcagactgtttatcagtagcctatgaaaagatctcagtaaaagacgtagccagaatgctgtacctgccaaacgaagaagctgctaaaacatttgccaaaaaggctttccagctcaaaccgtggaagctcaacaatgac

SEQ ID NO: 685 - DNA, 172 bp, Diabrotica virgifera
  misc_feature (1)..(172): RNAi target sequence DV-NATP8-FRAG3
tgtacaagcagttaaaatcagaatggaataccaacaacccaaatttaagtaaatgtgaaaaactactctcaactcttaagcttgagctcaccaatctaatgtttctgccgattaccacatctactgcgtccaaacaagaactacttctagccagagatgttctagagatagg

SEQ ID NO: 686 - DNA, 673 bp, Diabrotica virgifera
  misc_feature (1)..(673): RNAi target sequence DV-NATP14
actcacggttgtttttgtaaaacttgtaggtaacgaattttcgtttttagtgaattaacaaaacaacagagtgattttccaacaagaataacttatttattagtttcattaatttgataaacaataaaatggatagacttcttcgactaggaggtggaatgccaggtttaactcaggcaccgccgccttctgatgctcctgttgtggatactgccgaacaagtatacatatcctccttagcactattaaaaatgttgaagcacggccgagctggagtacccatggaagtaatgggtcttatgttaggagaattcgtagatgactataccgttcgtgtaatcgatgtatttgctatgcctcagactggtaccggtgtcagtgtagaagctgctgatccagtgtttcaaacaaaaatgcttgacgtgttaagacagactggtaggccagaaatggttgtggggtggtatcattcccatccaggtttcggatgttggttgtctggagtggatatcaacacccagcaaagttttgaggctctcacggaaagagctgtagcagtagtagttgatccaatccagtcagtgaaaggcaaagtcgttattgatgcctttaggttaataaatccgaatatgatggtattgggccaagaacctcgccaaactacatccaactt

SEQ ID NO: 687 - DNA, 246 bp, Diabrotica virgifera
  misc_feature (1)..(246): RNAi target sequence DV-NATP14-FRAG1
aactttagcagattactctgaaaattgtagtgtgaatgaaaagactgtagctgatatgttagaactagccaagaattacaacaaggcattagaagaggaggagaaaatgactccagaacagctcgctattaaaaatgttggcaaacaagatcctaagaggcatttagaagaaaaggttgatattttgatgaccaataatatcgtccagtgcttgggagctatgctagatacagttgtttttaagta

SEQ ID NO: 688 - DNA, 205 bp, Diabrotica virgifera
  misc_feature (1)..(205): RNAi target sequence DV-ATP5-FRAG1
tgacggtaattaacaagatggaggtggacggaggtccgaagggagaaggttttcggtcatattatattacaaagattgaagaattgcagcttatagtggcygaaaagagtcaaaatcttagacgtttgcaagctcagagaaatgaactcaatgccaaagttcgtatgttgagagaagaactgatgttacttcaagagcaaggaag

SEQ ID NO: 689 - DNA, 219 bp, Diabrotica virgifera
  misc_feature (1)..(219): RNAi target sequence DV-ATP5-FRAG2
ctatgtcggagaagttgtaaagcccatggataagaaaaaagtccttgtgaaagttcatccagaaggaaaatttgtagttgacattgacaaaaacatagacataaatgatgttactccaaattgtcgagtagccctcagaaatgaatcttacacattgcacaaaatacttccaaacaaggttgatcctttagtttccttgatgatggtggagaaagtccc

SEQ ID NO: 690 - DNA, 244 bp, Diabrotica virgifera
  misc_feature (1)..(244): RNAi target sequence DV-ATP5-FRAG3
tagattggacatcttaaagattcactccagaaaaatgaacctcacaagaggaataaatctgagaaaaatagctgagttgatgccaggtgctagtggagctgaagttaagggtgtgtgtacggaagctggtatgtatgcactaagagaacgaagggtgcatgttactcaagaagattttgaaatggccgtcgccaaagttatgcagaaggattctgagaagaatatgtccatcaagaagttgtgg

SEQ ID NO: 691 - DNA, 163 bp, Diabrotica virgifera
  misc_feature (1)..(163): RNAi target sequence DV-ATP5-FRAG4
gattgaagaattgcagcttatagtggcygaaaagagtcaaaatcttagacgtttgcaagctcagagaaatgaactcaatgccaaagttcgtatgttgagagaagaactgatgttacttcaagagcaaggaagctatgtcggagaagttgtaaagcccatggat

SEQ ID NO: 692 - DNA, 176 bp, Diabrotica virgifera
  misc_feature (1)..(176): RNAi target sequence DV-ATP5-FRAG5
tagctgagttgatgccaggtgctagtggagctgaagttaagggtgtgtgtacggaagctggtatgtatgcactaagagaacgaagggtgcatgttactcaagaagattttgaaatggccgtcgccaaagttatgcagaaggattctgagaagaatatgtccatcaagaagttgtgg

SEQ ID NO: 693 - DNA, 1432 bp, Diabrotica virgifera
  misc_feature (1)..(1432): RNAi target sequence ta00611.03_diavv
cagaatcttatctgtaaagataaactaattatctctattgactcacctcattttatacgtagcaggtgaaaatacaccattgtagtgaaaattattattagttcgatttataataagttcgattttttacgaaaatgacaagtatcgagactgtggggaccattgtcctgaaattgctgaagttggtgatcaatttgatatgtctcatcttgtaccgaaccggatatcaaggctacttcttgggagtaggaggaacctggaatctaaacgaagaaaaaaatcccgatgcagaaattgtggcttccggcgtattcgtaggatttatgatttacacattcgtctcgctgatcagcctttgcttcgctagtggagatcacaaaacgacattcactgatattctgatgaatatagtagggatttttatgtggatagctgttggagctacagctcttcattattggcttgggtacttgtccgaatacaaatacacgacaatagattctgaacgacaagttggtttggcgttaggagcgatgtgtataataaatggagcggtctatcttgtagacggagtactttccgcaatctttatcctcaaagccaaaatgcaataactttcatcgtaatataaatatatttatttaggttatatactttactttaagcagctcaagtataccgtgacatcccactcatacatcaatgtctataattgtttcatgacaaatcatttaatagtattttaaagcattcattcgttcaacaccttttttacatttttcaagtattatatcaatctttttaaagaattgtttggctattaaccggattcaatccatatagttccgtaaaataattatgcgttttaataattaatgtaattaaaaatagttagtatatttttgaaataaaacaactgccgcaacaaattagggagaatacttttgtctcctgtagttttatctgttatccaaagttcgattaaattgtttcaatttaatgtatttttccatataacgcaccaaatagtcttaaaaaaatagtgcctgttactacctaatactttctacgtatgccttatggttagtagtggctccaataggtgcattttacatttttcatgaaaattcaattcacattattttcctcccgttctcttcatattatatttatttattctttaatatagttttgggcgtgaagcccagtaaatacctatatgaagtatattgatggaactgccatgcttgatgggttttgtctgcaattaaaataaaaccaaaacaaacatttgtacagtattgtaaaattcacaatatttaggtagatgtttaaaatttaatattttttaagagtttgcatttatgttaatcgtagttaagtttttataaaaatttagtagttgtgagaaataaaataagtaaaagagaat

SEQ ID NO: 694 - DNA, 730 bp, Diabrotica undecimpunctata
  misc_feature (1)..(730): RNAi target sequence ta01434.01_diaun
tttatacgtagcaagtgaaaatacaccatcgtagtgaaaattaatattagttaaaacgaaaagttcgattttttacgaaaatgacaagtatcgagactgtggggacaattgtcctgaaattgctcaaactggtgatcaatttgatatgtctcatcttgtaccgaaccggttatcagggctactttttaggagtaggaggaacctggaatctaaacgaagaaaaaaatcccgatgcagaaatcgtcgcctccggagtattcgtaggattcatgatttatacattcgtctcgctgatcagcctttgcttcgctagtggagatcacaaaacgacattcactgatattctgatgaatatagttgggatttttatgtggatagctgttggagctacagctcttcattattggcttgggtacttgtccgaatacaaatacacaacagtagattctgaacgacaggtcggtttggcgttaggatcgatgtgtatagtaaatggagcggtctatcttgtagacggagtactttccgcaatcttcatcctcaaagccaaaatgcaataaatttcatcgtaatataaatatatttatttagtttctatattttactttaagcagctcaagtgtaccgtgacatccaacacaaatcaatatccataattgtttcatgacaaatcatttaataatattttaaagcattcattcattcaacaccttttttatatttccaagta

SEQ ID NO: 695 - DNA, 1629 bp, Diabrotica barberi
  misc_feature (1)..(1629): RNAi target sequence ta01092.02_diab
tattgactcacctcattttatacgtagcaggtgaaaatacaccattgtagtgaaaattattattagttcgatttataaaaagttcgattttttacgaaaatgacaagtatcgagactgtggggaccattgtcctgaaactactcaaattggtgatcaatttgatatgtctcatcttgtaccgaaccggatatcaaggccacttcttgggagtaggaggaacctggaatctaaacgaagaaaaaaatcccgatgcagaaattgtggcttccggcgtattcgtaggatttatgatttacacattcgtctcgctgatcagcctttgcttcgctagtggagatcacaaaacgacattcactgatattctgatgaatatagtagggatttttatgtggatagctgttggagctacagctcttcattattggcttgggtacttgtccgaatacaaatacacaacaatagattctgaacgacaggttggtttggcgttaggatcgatgtgtataataaatggagctgtctatcttgtagacggagtactttccgcaatctttatcctcaaagccaaaatgcaataactttcatcgtaatataaatatatttatttaggttatatactttactttaagcagctcaagtataccgtgacgtcccatacatgcatcaatgtctataattgtttcatgacaaatcatttaatagtattttaaagcattcattcattcaacacctttttttacatttttcaagtataatatattatacctacctatagttcgttcgctaaactcagacacaactggctagtgatttcggtagataatttttttgattttggacaattttaccaaaattactaactacatatttagtaattattttttgccaattttacgaaattgtcaaaattacttactaaaatcaatagccagttgtgtctgagtttagcgaactgactatatcaatctttttaaagaattgtttggctgttaaccggattcaatccgtatagttccgtaaaataattatgcattttaataattaatgtaattaaaagtagttagtatatttctgaaataaaacaactgccgcaacaaattaggaagaatacttttgtcccctgtatttttatgttatccaaagttcgattcaattgtttcaatttaatgtatttttctatataacgcaccaaatagccttaaaaaaatagtacctactaataccttctactacctaatactttctacgtatgccttatggttagtcgtggctacaataggtgcattttacattttttcctgaaaattcaattcacattcttttcctcccgtgctcttcatattatatttatttattctttaatatatttttgggcgtgaagctctgaagcccagtaaatatatatgaagtatattgatggaactgccctgcttgatgggttttttctgcaattaaaataaaaccaaaacaaaaatttgtacagtattgtaaaattcacaatatttaggtagatgtttaaaatttaatattttttaagagtttgcatttatgttaatcgtagtttaaagtttttataaaaatgtagtagttgtgagaaataaaataaaaccaaaacaaaaatttgtaca

SEQ ID NO: 696 - DNA, 720 bp, Epilachna varivestis
  misc_feature (1)..(720): RNAi target sequence ta26722.002_epiva
gtaaaaactgacttaattaggtttcagtatttttcttgtggttaatttggaaagtgtacgaaaatgaccagtatagagacagttggtgctatagctattcgtgttctgaaactggtaataaatattattgtcattatcctctaccgaacgggcaaccatggggcttttcttggtgtcggtggaacatggaacttaaacgaggaaaaaacggctgacgtggaaattatagcttctggagtattcgttgggtatttgatatacacagcggtctccttgttgagcttattatttggaacaagagacaacaaagtatatttcactgatgtcataatggggcttgttggaatactgatgtggcttacagttggtgcagctgccctacattactggattgggtttatcgacgaacacaaatacacagctgtatcttcggaacgatcggttggtctagcactgggcgccatgtgcatcctaaattcggtcctctatttgatagacacagtggtttcaacgttattcgtagttagagagaaattaaatggctcatttgcttgatgtgtagtaaattcttacaattaggtttacttttatacttttttctatttgttttactgaagattttctctatggagaattcaatcgacccgtgaattgtgttcgcagccatactgttagaatgaagcgaaaaactgaagattttctctatggagattcaactga

SEQ ID NO: 697 - DNA, 1043 bp, Leptinotarsa decemlineata
  misc_feature (1)..(1043): RNAi target sequence ta37400.0001_lepde
acccactgtttccatactagtcattttggcacaatcttatcagtcgagataacgtgattatctgtaccaacttactcacctcattttgttccatagcaggtgctttgtgcctaacagaaatatttgtgacttttcaaagttgattgaagataaacttgtgccaaaatgactagtatggaaacagtgggtacccttttcataaaactgctgaaattggtgatcaatataatcgttttaattttatatcgaacaggattccagggggaatttttgggagtaggtggaacatggaatttgaacgaagagaagaatccggatgcagaaatcgtggcctccggtgtttttgttggttatataatatataacattgtcagtatgatcagcttttgcttcgccactttggatcacaaatacaacttcacagatatcctgatgaatataattggtcttttgctgtgggtagcagtaggagcaactgctatccactattggcacggttatttggccgaacataaatatacccacgtcgactcggagagatcggttggattggccatggggtccctttgcgtcctgaatggtgcagcatatttgatagattcagtgctatcgataatattcttggttaaaacaaaaatgaattgagatcattcactaacctgatatgcatataggataatacttttcttaagttttttatatagaataaaattacgacatgacatgttctgatgatgatacattaaatcctttaagagatagatatcaccagataccaagcacagcatgctgaaatacattctttcattcatatagaattctttaatcatttttgagtagttgggaaaaaccgaatttgtattagtattcattgtaacttatattttagtgtatgtgtccgtttgtaataaaatgaattattgaaaatgtatcgatttcaattcaatcatgagtataattgaacacaataaagaggaacctcagggaagttactgaaataatcgttttatactttaaaataaatattctttaggataaaaaaa

SEQ ID NO: 698 - DNA, 648 bp, Orius insidiosus
  misc_feature (1)..(648): RNAi target sequence ta01487.01_oriin
acgacgctcttccgatctgtgaattaaaaaaaaaagggggacatcaaaaaatcaaagaaaaatggaaatggaaactataattacgatttttattaaagtcataaaatgggtgataaatctcattgtaatcttcttataccgatacggttattctgggcaattcctcggtattggaggaacgtggaatttgaatgaggagaaagatgcgacagcagaagttgtcgcttcgggcgtcctcgtcggctactttatctacacttcggtcattctaatggcattctgttttgggacgacaaaacataaagcgagcgttgtcgacataataatgaacataactgggacgatactttttgtcgcagtcggcggagtggcacttcactactgggccggatatcaaaacatgaatcatttccagccgatagcgactgaaaaacaagtcggtttcgccgtcgggagcctctgcgtcatcgaaggtgccatttatttagtcgacaccgtcctaacttttgttcacatcgttaaaaagaacgacctcttttaatcaaaagtacaaaaaacaatattttactttaaagaaaaattttaatttttataaattttgtattacaactgaagtattataataatattaatcttttttaaaaaaaa

SEQ ID NO: 699 - DNA, 820 bp, Coleomegilla maculata
  misc_feature (1)..(820): RNAi target sequence ta21166.0001_vibdu
aggatcagcttaactatcctaatagctatatctccctgtgttccactctgatcctatattcacttgtttttgtgtgtggtgtttttcatcataatttaattggtaaaaaaaataattttcgttttttttgtggaaaagtgagtgaaaatgacgagtatcgaaaccattggagctatagctattaggatagttaagctgatcctaaatctcatcattttgataatgtatcgaacaggaaatcacggaggttttcttggtgttggtggtacttggaacttgaacgaagaaaaaacagcagatgttgaaatcattgcttcaggagtcttcgttggctacttcatctataccgcagtctcacttatgagtatcctcttcggtaccagagataataaagtatatttcactgacgtcataatgggagtcattggcgtttttatgtggatcacagttggtgcagcagctctgcactattggcacgggtacttggatgaacacaaatacaaatcagtttcatcagaaagaacggtgggattaattatgggctcgttgtgcatcctgaatgcagctttatatctattagactcagtggttgccgttctgttcgtcgtaagagaaaaattaaatggccaattttgaaaaataatttcataattcataagtgtttttttgtattttttcaaatatgaaatcgacaacgagagtttaagtccaaccagaactgatttccagaatgacaaaagccccaaaggctatcctcactgcagttatttcgaaatagtggatacttataatttttaatgaagagcaaatatgaaatcga

SEQ ID NO: 700 - DNA, 5238 bp, Diabrotica undecimpunctata
  misc_feature (1)..(5238): RNAi target sequence ta00809.07_diaun
cgaactttactaaccgtagctactttttttgatgtgatctttatgttgcgctcatcagtagtgcgccagtttgtagtgccaattaaccaaaatgtggttaaagtactttgttatttttgttttgtttagtgttagcattaaaggacaagacgatggacttccaccagatgtagaaactatcgacaccaatgtaagtaacgcggagccagatgtagggaaacctattccggtggaagatacgcctaatggagtgtctccagtgaatccaaactatgaagtagataaatccctagttaatgtaagcaatagtttggtaaatgtgactaaaaatcccagacggacttatcagacagttaacaaactgggcaaatattcgacattttatgctgcagattacgatcctatgacctcagacaccgctccaccagacactgaccaacgaggaggagggactccatacactataaccgaaacgagattggcagaaataaggaaacattttatgtacccatttttcgataaaggaggtagtgataataacttgggagatttccaaaaggacattcaatcttccattcctcaggtgcacaagaatttaaacttccaattgcctttctttggattcaggtataactacacaagagtgtcagtgaatggatatctggaatttagcgacccacctccaaattatgactatcctttagtatttcctattaaagaatggcccaaaaagaatgatcctgcctttattggtatattcttcagcagatgcagaatcggtaatcttcgtgatggagacgtcgatcaaagaacaccaggggtctattttagaatggaaagagatttaagaaccaggcaagacagaatgggtgtagaaattagagaaagacttaaatgggacatcagagaaggcgtcattggatctgacaccttcgatcctaagcacgccgtgattgtcacttggaaaaatgtttccttcactggaggattcgctaatgctaagtacaagacaaacaccttccaaatggttcttgcaactgacgaagtattcacttacgcgatgttcaactacctaaacttggactggacctcccacactgaagccggtggtgattcgcaaaacggagaaggtggtgtcagtgcctacgttggttttaacgcgggaaatggtactagaagctacgaatacaatccttacagtcaagcttccgtcattcgagatcttacttcagttggatttggaaatggttttaagggaagacatattttccgtattgatgaggaaattttgcttggatcgtgcaacaaagatatagatggtgccaaccttcccctgaaattcgctcctgaaagtggtaatatgttgggaggaaccgtggtaaatataacaggtccatgcttcaatttgaatgataggattcgatgcaagtttgacgtttcaaatgaagtattcggttatgttgttgataagaacagagctatatgcgtacagccccaactgtttgccgaaggatgggttaatcttcaaattgctataaattctgaatcattcaagtggaagggaaagtattatgtagaatccccttctagtgcaacccaaaaaatcttcttcaaggacatgaaataccacgaaaaatctccgagtgaattaaaaataacttgggagaagcaaaatttgaccacaaatgaaaacgctaacatccgaatttccctctggggttacagagaaacaactatgaaaccagtgtttgtttatatcaccgatatcgcagatagtgttcaaaacattggagaatacacgattgttccttctcagtatagaactagagtaaaccaatatttgactgatattaagtttggattcctccaaattaatttaactgagtctatcaaagttaatacatacactacaacccaaacaaccatagaattaacaccggtagtatggagccggcccattccactcggttggtattttcaattccaatgggagaaccagtacggcaaaaattggcccaaaactctatgtgacgattggctgagaacggacagatatctaaagaacttcgctcacgaacttgctcagtgtccctgcaccgtcgaacaggctttagctgacaagggcaggtttatgccagatttcgactgtgacaaagattcgaatccgatttgttactataacaaccaagcacttcattgtgtgaaaactggatctcccactttagaaggttctgaacaacaatgttgctatgataaaaacggctttttgatgctctcttacgatcaacaatggggttctagtccgagacgttgccacaacttaggtaaaatgccttacaatgaagcgacaaaagttcctactctctcacaatggtttaatgatatggtacccaaatatttatgttgcctttggcaagacgagcaagctgttggatgtgaaacactgagatttgaacgtagaccaacacaagattgtgtagcttaccaagcaccaggcgtcgcaggagtctatggtgatccacactttgttactttcgacgatgtagaatatacgttcaatggaaaaggggaattcgcattggtgaaatcggttacacaaacggacaatctggaaattcaaggaagattcgagcaaatggaccctaacgcttatggtgaggttagagctactcagctgacatctgtagtagctaaaggtaataacacaatagcaattgaagtcagaaggcgaccactagattctagatggagatataggttggatgttatagcagataatagaagactgtatttcgatagaccctcactaaaattccagcacttccaaggagttactatttatactccaacctacatccttaatcaatcagaagtcatcattatgtttgacaatggagctggaatggaggttgtcgataatcaaggatacatgagtgcaagagtatttttgccttggtcgtttataaataaaaccataggcctttttggaaattggagtttcaacaaagaagacgactttacacttccagatggttccagagcagcaatagtctctaacataaatgacatggaaagggtttacactgattttggttccaaatggatgttagatgatgtgttagatcctcaaaagggtagagcgttattccatagggaatttggaagaacttcagccacttacaacaacaagacgttcaagcctcaattcctaatgaccccggaagatttcataccagccaacagaactgcggatattcagcgaacatacgaaatatgtcctctaaggatgtacgaatgttactacgattacggtatgacgcttgatagggatttggcacattataccaagaattataaagccacaatatatcaatataaagaaactacaaggaccaaagttgtgtcttgtggtgtactggaaacaccgaggtttggacgaaagagtactttcctgttcgtgcctggaactaaggttacctacgaatgcattcaggagttcgtgctggtaggtgatcagcgcagggagtgtcaagcggatggaacgtggaatattcctgaatacggatacacttattgcttacgtcagcaagaatactcccaacgacaggctggtctggcttccgggataattatggcaattcttataccgctcatcttgcttttcgtctatctagcgtatcgtttcttacaaaaaaagcagaaagagaaagaagctgaaaaattagaagagcagcaatttatggatcaacaaagaagggcacacgaagcagctactaagaagttaacagaagccgaatatgcttcagaagatgaagacagtaatgttacaagcacgggcgcaaaagaaacaactgtatattaactcctataaaatacaatgattcaacctatgagttgcaacattttaaagtttaatatttctaaaatctttatatagaataagtactagatgtagttaatgtataaataggacttttttattgtaggattaaaaatccactgatgactaaattcaaacactatgttttattcaataaagtgtagacttttttatgtttatgttccatgtagagtgtgatgtgtcaaatatggcgtttttaaccaccacgtaatgtcttcttcctatagtaaatttaatattcttcaaaggtacttgtccattgaattgtatgcctatctaatcctgtaatgcccatctttttttttcgaattaaatgaataatacaaaatttgaaaatcaaaataaattaatcaacttcatataacccggtagaaagcgatgtcctgcaactattatctaaattaatatattattcagtaaccatatcaagctctattagtggtgttatactcctgtattttataaacaacggtttgttaatccaccaacttgcttctatttgagaagatgaatcaatacgctcagctgctcacataaaatttcacatagaatcgtttcaagcaagccagagtcatactcacaatttgtcaaaatttttgccgacaaactgtatttagcatagaactatcttatactaggaagatcagaaaatatctatgccatgaacttaagcacaaaactagccaaatgaaacggcttattggaagggatatgaagtggaaaatggatgtacctaattatgctaaaagtttttcacataccaaagcatttcacaaatttcggccgaatattgttatcacagtaattgtatcttgcatcgttagtctgaaatatcatacatcgacaaaattattagatctaaaatcatcctaagctaaacatacagttcaaaaccattgttgcgtggttacaattctagttttgtgtataaacttcgtccacataagtcgaatccggtttgaatctactcacgagtttgcgataatcggacttttagatttatatatgtatctaatccaggattccaaatataataatgtctaaaatgtaattgttcaaaccgaagtaggaatctctaagaccacttaattataaaagtagttatttgaaagagaaggtaatagttacctgcgttcacatatacaaattaattagaacttgaaagaaattcgttgttaaaacacctatgaaaagaaaaattgatttagtcaacgaaggattccttctagaatgttctatgttatttattaagtacaacatattttcctaccttagtaatactttactttattagaaaatctagtacagttcgtgttaaatctcaaatttactattat

SEQ ID NO: 701 - DNA, 4313 bp, Diabrotica barberi
  misc_feature (1)..(4313): RNAi target sequence ta06241.06_diab
aaaacataactttttgactgaagaatgtttctaggtacagcggcacaaatactttggtcttaagatagtaaaataatgaaaatttataaattaaatgatactctataaactattgaagttcacttctactctaattatattctaaacgtctgtcactatactactctgactagcgctaatcctttctttaggtttctttattggttctgcatacatgtcgttatagttcaaattctttgagctgttccctctaataatgtctggtcgactataaggcgttgtatattgaatactagaagtaggactagttggacttcccgtaggcgttctagaaaccctatcgtcttcgaaggtttgatcgtaagggtccaatggcttctcctcgaactcagaattcggtctattgggcaaaggttcgtgagttctgtaggacttgtcgtaacttcttcgtttcttgctaagcgagtcagtgtcgctttgaggatacttttcgtcctcgtcttcttctctgtatggacttaaagttcgactgaattgttggagattttgagtcttttgtacggtgtcgtagtcatagttttgattgttacttgttagtctttgatatactttgtagccaccgtaacctattagaagaaccaatggtatgataattgcgaggattatacctgaagtgatggcagcttgacgcgaagaatattcttcttgacgtaagcaatatgtgtatccgtattcaggaatattccatgttccatccgcttgacactctctccgctgatcacctaccaacacgaactcttggatgcattcataggtaaccttcgtaccgggcacgaacaggaaagtactctttcgtccgaatctcggtgtttctagtactccgcaagacacaactttcctccttgtcgtttctttatattgatagatcgtggctttataattcttggtgtaatgcgccaaatccctgtcaaccgtcatagcgtaatcgtagtaacattcgtacaactttagaggacatatttcggatattcgcttaagatctgtagatctgttggttggtaggaaatcttccggattcattaggaattgaggcttgaacgttttgttgttgtaagtcgctgaagttcttccgaattccctgtgaaacagcgctctacccttttgaggatctaacacatcctccaacatccatttggaaccaaaatcattgtaaaccctttccatgtcatttatgttattgactattgctgctctagaaccatctggaagtgtgaagtcatcttctttgttgaaactccaatttccaaaaaggcctatggttttatttataaacgaccaaggcaaaaatactcttgcactcatgaatccttgattgtcgacaacctccattccagctccattgtcaaacataatgatgacttctgattgattaagaatgtaggttggagtgtaaatagtaacaccttggaagtgctggaattttagtgagggtctatcaaaataaagtcttctattatctgctataacatccaacctatatctccatctagaatctagaggtctccttctgacttcaattgctattgtgttattacctttagctactacagaagtcagctgagtagctctaacctcaccataagtgttagggtccatttgctcaaatcttccttggatttccagattgtccgtttgcgtaactgatttcaccaatgcgaattctccttttccattaaacgtatattctacatcgtcgaaagtaacaaagtgtggatcaccgtagactcctgctacacctggtgcttggtaagctacacaatcctgtgtaggtctacgttcaaatctcagtgtttcacatcccacagcttgctcgtcttgccaaagacaacacaaatatttgggtaccatgtcattaaaccattgtgagagagtaggcacttttgtcgcttcgttgtaaggcattttacccaagttgtggcaacgtctgggactagaaccccattgttgatcgtaagagagcatcaaaaagccgtttttatcatagcaacattgttgttcggagccttctaaagtgggagatccagttttcacacaatgaagtgcttggttgttatagtaacaaatcgggttcgaatctttgtcgcaatcgaagtctggcataaacctgcccttgtcagctagagcttgttcgacggtgcagggacattgagcaagttcgtgagcgaagttctttagatatctgtccgttctcagccaatcgtcacataaatatttgggccaatttttaccgtactggttttcccattggaactggaagtaccaaccgagtggaatgggtcggctccatactaccggtgttaattctatgctgctctggcttgtagtatatgtattaactttgatagactcagttaaattaatttggaggaatccaaacttaatatcagtcaaatattggttcactttagttctaaactgagaaggaacaatcgtgtattctccaatgttttgaacattatctgcgatatcggtgatataaacaaacactggtttcatagttgtttctctgtaaccccagagagaaattcgaatattagcgttgtcgtttgtggtcaaattctgcttctcccaagtgatttttaattcgctcggagatttttcgtgtaatttcatgtccttgaagaagattttttgagtcgcactagcaggagattctacataatacttccccttccacttgaatgcttcggaattaacagcaatttgaagattcacccatccttcggcataaagttgaggttgtacacagatcgctctgtttttatcaacaacatacccaaatacttcatttgatacgtcaaacttgcatcgaatcctatcattcaaattgaagcatggaccagttatatttaccactgttccacccaacatgttaccactttcaggagcgaatttcaggggaaggttggcaccatctatatctttgttgcatgatccaagcaaaatgtcttcgtctatacggaaaatatgtcttcccttaaaaccatttccaaatccaactgcagtgagatctcgaatgacggaagcttgactgtaaggattgtattcgtagcttctggtaccgtttccagcgttaaaaccaacataggcactgacaccaccttctccgttttgggaatcaccacccgcttcagtgtgggaggtccagtccaagttgaggtagttgaacatcgcgtaagtgaagacttcgtcagtggcaagaaccatttggaaggtgttggtcttgtatttagcattagcgaatcctccagtgaaagaaacgtttttccaagtgacaataacggcgtgcttaggatcgaatgtttctgatccaatgactcctgttctgatgtcccacttaagtctttctctaatttctacacccattctgtcttgcctcgttcttaaatctctttccattctaaaatagaccccgggtgttctttggtcaatgtctccatcacgcagattaccgattctgcatctgctgaagaaaataccaataaaggcaggatcattctttttgggccattctttaattggaaatactaatggatagtcataatttggaggtggatcgctgaattccagatacccattcactgaaactctcgtgtaattatatctgaatccaaagaaaggcaactggaagtttaaattcttgtgcacctgaggaatggaagattgaatgtccttttggaaatctcccaagttattatcactgcctcctttatcgaaaaatgggtacataaaatgtttccttatttctgccagtcttgtttctgttatagtgtatggagttcctcctcctcgttggtcagtgtctggtggagctgtgtctgaggtcataggatcgtaatctgcagcataaaatgtcgaatatttgcccagtttgttaactgtctgataagtccgtctgggatttttagtcacatttaccaaactattggttacattaactaaggatttatctacttcatagtttggattaactggagcgactccattaggtgtatcttccaccgggataggtttccctgcatctggattcgcgttacttacattggtagtgtccacatcgatagtttcaacatctggtggaagaccaccatctagtcctttaacgctaacactaaacaaaacaaaaataacaaagtactttaaccacattttggttatttggcactacaatctggcgcacatcacatcaaaaaaagttgctacggttagtaaagttcgtactcgagtgtttgcaagaatcgctagaacgagat

SEQ ID NO: 702 - DNA, 1564 bp, Epilachna varivestis
  misc_feature (1)..(1564): RNAi target sequence ta29117.001_epiva
cttcaatggaaaaggtgaattcgtgctgatgaagactaacgtggcttcgcagaggttagaagttcaagctcgtttcgatcaaatgccacctaatgaatacggtcaagttagagccacccagctctcctccatagctgtcagaggcaattcttcgactattattgaagttagaataagaccaaaggaagccaggtggagatataaaatggatgttattgcggataagcaaagaagacttttcttcgaccgaccttcgcttaaattccaacattttccaggtctaaccgtttacactccaacatatatcctgaaccaatctgaagttattataatgttcgactcaggagctggtgtagaaattgtagaaagtttgggattcatgtcagcaagagtttacttaccatggactttcataaataaaacaatgggacttctaggaaattggagttttgacatgaccgatgatttcactttacctgatggtacaaaacgacctgtttctggtaatatcaacgacatgcaagacatttacgaaaacttcggcaagaaatggatgattgatgactcagacgatcctcaaaaaggaaaatcgctgttctttatcgaaaacggacggactgcagccttctacaacgacctaaatttcgtacctgaatacagcatgaatataaactacatactggcaaacaaaacaggtcgtattgaaatggcaaatcaatggtgttccaataaagactatcagtgtatgtacgactatgcgatgacattagataaagatatggctttttataccacaatttttaaatcgggcttgcaaaacctaagagaagcggcaagcaaaagggtaacgtcttgcggtgtgttggaaacgcccaggtttggttggaaaacgaatttcttcttcacgcctggaactaaagtcagtttcgattgtgctcaagacttcgtattgagcggtgatcctagaagggaatgcctgaagaatggagagtggaatatcccagaatttggttatactgaatgtttacgtgaagaagaatattctctgagacaggcaggaactacatttggaataatacttgcagtgatgattcctcttatacttttatttgtattctttggttacaaatatcttcagaagctgacagcgcaaaataatgagcaatatgaagagaaaatgacattggaacaacaaaaaaggttagcacaagaaagggcagctaaaaaattaaccgccgttgatgaggaccatgatgatgatgtgctttcggaaacaaatacttcatcgccaagagaaacaacagtgtattaattcgtaaatttcgattagtcatgagttaggaaaacgtagtttgccatcattcataatattttacttcaaaatttgaatgtgaaaattttttcaaaaaatttttaaatatggatatataaaattataggagtttttgtttgatgattgttaagtagaatccaatcgctctctataaatcaaaaaattcagagacagaacagctcttttagatttagaggtattttaaatgttcataatcgcattttacatttc

SEQ ID NO: 703 - DNA, 5020 bp, Leptinotarsa decemlineata
  misc_feature (1)..(5020): RNAi target sequence ta36833.0009_lepde
ataacaaattttatcttgttacagagcacacttgtgagaaggcaatcgagtaacgaacctcatacataaaagtacacgtatggtgatagaaaacaataaattatcaaactgaggctctgtgccaagttttggaaaatgtacgtcaagtggaaattggttttgactctagtactgtgtgttggtgtcgtgattggggaagatatttcaacagatataatccccttgccacaagacaatacagcagatgtggaaatagtggctacagaaactaggtcaaattcaggatctgaagctgctgtagaagagcccaccaataacactgggccttcagatactacaaacccaaattatgctgtagtgccccctgtagtttctgatagcaaacctgcaataacaaatagtgaaacaaatgacactaacaatgatgttgtaatgttgagtcctacgaaatttctcatgaaaaagggacgatctggacgtttattggaatatccgactgattacgatcctatgacttcccatattgctccaccggatagtgatcagagaggatattcaggagtaccatatgtcttgacggaaaccagactgcaacagatccgccaaaatttcatgtatccctactacaacagaggcggtaatgcagatgacgaaggagactaccagaaagaaattcagtcatctattccgcaagtgtacaagaacctcaacttccaactccctttcttcggatttcgattcaattacacgagggtctccttaaacggctatttggaattcagcgatcctcctccaaattacgactatcctttggtctttccagtcaaggaatggcctaaaaagaacgacccttctttcatcggtatctttttcagtaaatgtagaatcggtaacctgagggacggagatattgatcaaagagaccctggagtgtactttaggatggaaagggatctcagaaataggcaggacaggatgggagtggagatcagagaacgactgaaatgggatataagggaaggggtgatagggtcagaaacattcaatcccaaacatgccattatagtcacatggaaaaatatctctttcaatggaggttttggcaatgctctctaccagactaacactttccaaatgatcctcgccactgatgaagttttcacctacgccatgttcaactacttgaatcttgactggaccacccacactgaagcgggaggcgacacaagaaaaggagaaggaggagttcccgcttttgtgggattcaacgctggaaacggtactagaagttttgaatacaaaccatacagtcaagaatctgttattcgagatctcacacaaactggtttcgctaatggtttcaaaggaaggcacattttccgaatcgacgaaaatatcctaactggaacatgcaataaagatatagatggtgctaatctaccgctaatgatatctccagaaagtggaaatatgctgggtggaacaatagtgaatataacaggaccttgtttcggcctagacgaccaagttaaatgcaaatttgatgtagcaaatgaaataaatggcgtcgttatagataaaaacagggctatatgcatccaacctagactgtatgccgaaggatgggtgaatttacaaatagccataggggctggggtatacaaatggaagggaaaatattatgtcgaatcccccgcagcggcatctcaaaaaatctacttcaaggacatgaaggttcatgaaaaatcgcctagtgaaataagaataacttgggaaaaatacaacttgaccactaacgaaaacgctaacattcgtatctccttatggggttacagagaaacaacaataaggccaacgttcgtttacatcactgatatcgcagacagtctccaaaatactggagagtataccatcgtaccgtcccaatatagaacaaaagttaatgagtttctcacggatatcaaatttggtttcttgcaaattaacttgactgaatctatcaaagtgaacacttatacatctgtacaaagatcggtggaaatagttcctgttgtatggagtcgacccattcccctaggatggtactttcagttccaatgggaaaatatgtatggacgaagctggcccaaagcactctgcgatgactggctaagaacagacagatacctgaaaaactttgctcatgagttacctcaatgcccttgcactgtagaacaggctttggcagacaaagggaggtatatgcccgactttgattgcgacaaggactcaaatcccgtatgctactacaataaccaagctctgcactgtgtgaaaacaggatcaccaacgttggagggatcagaacagcagtgctgctatgacaaaaacgggtatctcatgttatcatacgatcagcagtggggttcaagtccacggcgttgccacaatctgggaaaaatgccctacaacgaagcaacaaaagttccaaccttatcgcaatggttcaacgatatggtaccgaagtatctttgctgtttgtggcaggaagaacaggcggtgggttgcgaaacgctgagattcgaaagaagaccaactcaggactgtgtcgcgtaccaagctccagggattgctgggatttacggagatccccacgtcatcactttcgatgacgtcgagtacaccttcaacgggaaaggagagtttgctcttgtgaaatctgtgacacaaactgacaacttggaggtgcaaggcagatttgagcaaatggaccctaacgcctacggagaagtacgtgcaacacaattgacttcaattgtggcaaggggaaacaacaccatagcagtggaggtcagaaggaggcccttggatgctaggtggaggtataggctggatgtcatagctgataataggaagttgttcttcgacagaccctctttgaaatttcaacatttccaaggagtgactatttatacacctacttatatcctcaatcagtctgaagtcatcattatgtttgataacggagcaggagttcaagtaatggataaccagggattcatgaccgcgagggtgtatcttccttggtcattcatcaacaaaactgttggtctctttggcaactggagtttcaataaggaagatgacttcactcttcctgatgagtcgaaggctgccgtcgtgagtaatatcaatgatatggaaagggtctacaatgactttggttccaaatggatggtggacgacgtactagatccgaaaagaggtagatccttatttttcagagaattcggcagatcatcggcaacgtacaacaacaaaactttcaaaccgcagttccttatgttacctgaggacataatacccgcaaacaggtcgatacagatacagagaacttacgacatttgtagcacaaaaatgtacgaatgcttctacgattatgccatgacgctcaacagagatcttgcccattttactcagaattataaagcaaccatatatcaactcaaagaaacgacgaggcagaaggttgtttcttgcggagttctggaaacaccgcgattcggtaggaagagtacttttctttttataccaggaaccaaagtcacttacgagtgcaatcaagacttcgtattggtgggagatcccagaagagaatgtttggcagatggcacatggaatgctcctgaatatggctacaccgaatgtttacgtcaacaagaatattctcagcgccaatcagccattgcctctggagccgttctcgcaataattattccactagttctattatttgtatatctggcttatatgttcctcaagaagaaacagaaagaacgagacgaagaaaatttacaaacgcaagcgtacgagcaacagaaaagacaagctcaggaagctgctgctagaaaattaactgctgccgaagagtacaactcagatgaagacgataataacagcaacgttacgagcacagcaaaagaaacaacagtgtattagtattagatatggtaacacttttacgatattattattttggttggcatacttctcagacaaacagtccaaattattatttgcaacaagaactatttgaatttcgaagtttcctttgaagatcccaagttgcttattatcctaaatttttgcaaaatgtcaaaatcgtactattccatcagttgtatattttatttttctgagatagttaggccaacaggtatctaaaggagtgaataacagatttttcatattttccagttttatctgattcaataatgcactatgggttttttctgttaatggtttttataacacctctgttgcaaaatacatattaggtaatataaatatacgtaattaagtcgtaattaagtattataacaaaatggcgttctctattatttaaattgtaattagatatatattttttatattcataatcacttttgcatgtaaagtaggagtccaattttctgtacttcaaccatcactatcgctacttaccccgatcactttttggatgcacatttcatgcacatttttgcacattgtttgcacagtaagttcactttgcaaacaatgtgcgaagactatgcgggaggacatgtttatgcagtaattttgtatatatgtgagtaggtatatacctactattttcatcatactctggtcctacttttcttatttacagtgataagatgatgtttgaaatcttgaattaggtacaatgaattcatttttgtcagttatttgaaacattttcggatattttaataagactgtgttttatcaaagttcagtttgattgtccaaatactagtagatcattagagtcctactgtagttttagcattttaataaagtaattcaatattaatatacaagtaatcttgcacttctgctaactcaaaattttgcaaaattattcactcgaatcagtattcacacgtttctctttcagaaataaccaaaatatttcaccccatacacaaatttcattaggtttagtgaaatttgtgtatggggtgaaatattttggtta

SEQ ID NO: 704 - DNA, 3724 bp, Orius insidiosus
  misc_feature (1)..(3724): RNAi target sequence ta02139.06_oriin
tttttaacgttaataaaacagttttttaatataaaaaaagtgtacaaaagtttagtatatgtcggtttctacgctatcggcgcgacgcatttgagatttgggggagtcgaacgagctgtcggttccgtcttcgaagtcgatgtcggggcggttcggaaggggctcgtgtgtattgtaaacggcgtcgaaattgctcggattcctaacgagtttatcctcttctttaccccggccagataaggaagaacgcctcctgctgtacttccagctttggaccccgttctgaagacgggctgagtgacggcgataaaaccacgtcgcgatacagaccagtgtgaggaccaacggcaaaagaatgcccaaaatcataagcgacatattcgccagttgttgcctgtcgtattcgacatacctgagacattcggtgaacccttcatccccttcgatccatttcccttgagcggagcacttcctttgttgatctccaacaaaatgaaaccttgatcgcattcgaaaataactttggtatcaggaacgaagaagaagttacttttccttccaaatcttggcgtttcaagaactccacagctcaatgttctcattttgttggtctgcttgatggatgaatattcgctgaagtagtccaaagtctgtttcgccatttcacgattgaggctcaccgcgtaatcgtatttacattgatacgagtcgccgcagaggtcttcagccttagagacgtcctgtgtccgattcggtggtatgatttcctgaggagtttttttccattctggtacaaaagtacgattcgcatagtacgatgctgaacggccatactcccttatgaagaggggctccccttttttcggatctgctctatcttccagcaaccatttgagagcaaaatctttgtgtattcgttcgaaatcttcaaggtctccgacttggacgatttgtccgtcaggagtggtgaagtcatcggaaatgtcgaagctccaatttcccatcaaacctcgcgtttgattgatcatcatccagggcaagtagacacgacaggccatgtatcctttgttctcaactacctcaactcctactccggtttcgaacataatcacgatctgcgattggtccaaaacctgagatggcaaatagacggtgacgcctcggaagtgctgaacacgaagtgcaggacggtcgaaaaagactcgacgtttgttggcgaaaacgtccaatctgtatcgccattgggcgtatcttggtcgcaagcggacttcgatgatcgccgaattatttcctctagctgcaacagatgtcagtaaagtggcagcagtgtctccgtagatattcggcccgacctgttcgaatctcccttgtacgtcaagtttgtatttatctgttgaagaatggagcaaaacgaattcgcctttaccgttgaaagtgtattcaagctcgtcgaatgtgacaatgtgaggatcgccgaagacggtagcgacgtaaggcgcttggtatcctacgcagtcttgactgggtcgccgttcgaaacgtaatgtctcgcatccgacagcttgctcagactgccataaacaacagtggtagaatgggcttatatcatgccaccactgcgataatgttggaactttgttcggctcagtccacggtaaaagacccaaatttgatgatctcttcggcgaagacccccatttctggtcgtacgacaacatcaaatattcgtttttgtcataacagcattgttgttctgctccttccaaattcggagcaccagttttgacgcaatgacgtgcacctttgtggtaaaaacagttcggattcgcgaccatatcgcaatctggatcgggcaaaaaacgccctttgtcgtttaacgcttgctgtaacgtgcacgggcattgggccaactcgttagcgaaattcttcaaaaatctatcgttcataagccactggtcgcatttcgcttctgcccactttttcccgtagagtctctcccattgcggagcgaagtaccatccgagaggtatcggcttactccatattacgggggttatgctaagtccttgatattgggtcgggtttgtcaagttgatttgaatgaagccgaaagtgagctcggacaattcatagttgttccttgtccggaaattggccggttgtatgacgtagctgcctgtgtttgccacacctgattctaacgtgtcaacgtaaagaagtttcggtgctatattcgtctctttgtacgcccaaatcgaaatctgcaaaggagccgcagaattggaagttaaattgtatttgttccacgttattttgatttctccaggataagcatcattcacacttccataatgatcgttctcagcaaaagagatcctttgcgtcgccgtcgctggagtttcgacaaagtatagtcctttccaaatatatttgtcgtcgtttaacgagatttcgaagggtatgtaaccttcagccatgatgaaaggctgaacgcatatcgcccggttggtgtcgaccactgttcctaaagtcggcgtcgtatcaaacctgcatattatcttcatttctttggtaaaacaaggtccggtgatgttcacaatagtcccgcccaacatgtttccagattcaggtgcgaaattaaggtccaaacttgctgcggctatatccttgttgcaagatcccggaagaatgttttcgtcaatacggaatatgtgacgtccaggaaatccgttagcccaaccacgccccgttaaatctcgaatcgtacttgcctgcgaataaggtttatattgataagtccgagtcccgtttccagcattgaatccaacaaacgcaggagtacctccttcacctccagtggtatcaccatttgcttcagtgtgcgttgtccattgtatgtccgcatagttgaacatcgcatatgtgatgacttcatcagtagccaatacaagttggaatgtattcgttttgtagagactgatgtcgattcctccggcaaaagatacgtttttccaggtgatgatgactgcgtgttttggaacgaatgagtcagaaccgatgacgccctgacggatgtcccacataagacgttctctaacttcaaccccgaaacggtcagtccttccttgtaaatctctttccattctgaagtagacaccaggaggtctttgatccacatctgtatctttgatgagaccgatacggcatttggaatagaaaataccgataaaactcggatcgttctttttgggccactcgaccgtcgggaaatgaagggggtaactgtactgttctggagggtccgaaaactcgagataaccgtttaagcttacgcgtgtgtagttgaagcggaaaccgaaaaagggaagttggaaattgaagtttttatggatttgggtagaggaaggatgaatgtctttttgtaggtcaccggaatcatttggaccacctttatcgaagaaccaataaaggaagttggaacggattttccgtaaacggtcttcagttatcacgtacgggagttccccaggccctgcacgttgcgttggaggtgccgtcctttcatcatcaaaatcgtatggatttctcgggttgtaggggttgtaaggagtcaaaaccctcgaaggctgcctgtagttgttgctcctcacgttgataacttcattgaaccccgggcgcacactttgtcctctttggccttccgaacttttcaaaaagtaaaaaa

SEQ ID NO: 705 - DNA, 3845 bp, Coleomegilla maculata
  misc_feature (1)..(3845): RNAi target sequence ta22533.0010_vibdu
caaatttcaaaatagaaatgaatctaaaagattagcaaatccgatcattagtgatgtacaatactgatgaacggaacattttaacatggtgaaaattcgaatattagttactttttgtatattcaaatttgttctgggtgaaggaagtgtcagttctaatgatgtggaaagcattgttggtgtgcctatgaaaaaagaagtacttggagctataggagaggataatactgatacattccccaatgtaaatggagccggtcctgataataattacgcatccgccccgattcctggagcttctgttactttccataggccttcagggaaatatataaccaactatgataacaattacgatccaatgcgctcgaatgttgcgcccccatccgtagatcagaggggtggttccggcttaccttactacataactgaagataggctgaaagaaatacgttctctgtttatgtatccatactataataagggtggaggtggtgacaacgatggagattatcagaaacaaatccaagcctctacttcaatcgtacacaagaacctgaattttcagcttcccttcttcgggttcaggtacaattacactagagtttcactcaacgggtatttggaattcagcgatccaccaccaacctatggcaaatatccactcatctttcctagtcctggatggccggaggtgaatgatccagctttcatcggaattttttatagcaaatgtcgtatgggtcttctaagggctgaagatatagatcagaggaatcctggagtgtatttcaggcttgagcgggatttgaggagcagaaccgaccagatgggtgtcgaaataagagaaaggaccaaatgggacatcagggaaggtgtgataggaactgacagtttcgatcctaagcatgcaattattataacttggaaaaatgtttctttcgctgggggtatatctgacagtttgatgaggaccaacactttccaaatggtgctcgtgacagatgaagttttcacttatgccattttcaactacctccacctaggctggaccactcatacggaagcaagaggtgatacgactacaggagaaggaggtactccagcatttgttggattcaatggaggaaatggcactagaagttttgaatacaaaccatacagtcaagattcagtaatacgagatcttacatcaactggtttcgccaatggttttccaggaaggcacatattcagaatagatgaaaacattttactaggaacttgtaataaggatatagatgccggtcggttagatctcatgtttgctccagaaagtggaaacatgttaggaggaactgttgttaacataactggtccttgcttcaaaccgaatcaaaaaatcacctgcatctttgatattgctccgccagttattggcgttattgttgatagaaatagagccatttgtatacaacctccgctaatggctgaaggttgggttaggttcgagattgcagtgggaaacgagaggtttaaatggaaaggaagatattttgtcgaaacacccacaatggcagcgcaaaagatattcttttcagacatgacgtatcatgacaaatctcctgcggaaattcggatatcatgggaaaataagaacttaacatctaacgtaaatgcgaatataagaatttcactatggggttatagagaaacactcgtatctccccaattcgtttatataacccaattggcgacgaacatacaaaacaccggagaatacgtgattgtcccatctcaatacagattgaatgaaaacaagtttcaacaagatataactgtcggtttcatccagatcaacctgactgattcgatacctgttggtaacagtagcgtgaaaataacaccgctcatatggagcagacccattcctttggcgtggtactttggtccacaatggcagaggttatatggaaacagctggccttcagttctttgtgataattggatcaaggatgatcgttatctgagtaatttcgctcatgaattacctcaatgtccttgtactttacaacaagctttagttgataaaggaaggtacatgcctgggttcgattgtgacagagactcgaacccattatgctactaccaagacaatgccatacattgtgttcgatcaggtttaccaacgaatgaaggaggggaacagcaatgctgctacgataaaaataatttccttatgctgtcttatgaccaaataggaggctcaaatccgagacgttctcacaatttaggtttcaacccttacacagaatctacaaaagtacccggtttgtcacagtggtaccacgacatgatcccgaagtttgtctgttgtcgctggcaagacaaccaagcagtcggttgtgaaaccttcaggtttgaaagacgaccaactcaagattgtacagcttaccaaggacctgccgtggctggggtatacggagatccccatgtaatcacgtttgatggattggagtacacattcaacggaaagggccagttcgttcttgtgaaaaccaacgttgcctcgcaaaggttagaggttcaagcaaggttcgagcagatgcaaccaaatcaattcaatgaggttagagccactcagttgacgtctatagccattagagggaatgcttcaactatcattgaagttagaataagaccaaaacatgcaaggtggaggtatcggatggatgttatagccaacaaggagaagagactattttttgacagaccttcattgaagttccaacatttctcaggattgacggtttacaccccaacatacatactgaaccagtcggaagtgattgtaatgcttgattctggagcaggtgtggaaatagtcgaaagtttagggtacatgagtgcaagagttttccttccatggtcgtttattaataaaactgtcggtctctttggaaactggagttttgatataacagatgatttcactcttccagatggaacgaaaaaacctatcatcaccaacataaatgactgcaaagtgtttatgacaactttggaaaactgtggatgatagacgactccgaagattcgcaaacaggacaatctcttttcgttaacgaatttggacgtactgctgcatactataacgacctcgactttgtaccagaattccgaatgaacattagagatctgctaataccaaccaacgcatcggattattatatacagcaggcatacaaagcatgcaccaacaaagactaccaatgcttgtatgattacgcaatgacattggacaaagactgcgcattctatacaacaatattcaaatcaggtttgaaaaatataagagaagctagcggtgaacagactgtatcatgcggtgttctggaaaccccaaggttcggttggaaatcgaatttttcttcactcctggaagtaaagttagtttcgaatgcgctcaagatttcgttcttgacggggatcctagaagagaatgcatggaaaatggacaatggaacctacccgaattcggattcacggaatgtttacgtcaagaagaatattcgttgagacaagcaggaactacatatggaataatcctggcagtgatgattcctcttattcttctactagttttctttggattcagatttatgcgtaaactatctgaacaaaatgaccagaccaatcaagaaaaactgactatggagcaacagaaaaggttggcacaggagagggcagcgaaaaaattaacagatgtcgatgatgagcataatgatctattttcagaacattctcaatgttatcagcaatatcaatggttttctacatgaatatatcttcaaatgtgtgaaaaa

SEQ ID NO: 706 - DNA, 982 bp, Diabrotica undecimpunctata
  misc_feature (1)..(982): RNAi target sequence ta01950.01_diaun
tgaaaaagcaaatcactacgacttgccggattttgtagtagtgttaattttgtattagaaaatcaaaatgagttctattggaactgggtacgatttgtcagcttcccaattctctcctgatggaagagtttttcaagttgaatatgcaatgaaagcagttgaaaatagtggcactgtaataggtctccgaggtacagatggaattgtattagctgctgaaaagcttattatgtcaaaattacatgaacccagtacaaacaaacgaattttcaacattgataaacatataggaatggcattttcaggtttaatagctgatgcaaggcaaatagttgagattgctagaaaagaagcatcaaattataggcaccaatatggatcaaatattcctcttaaatacctaaatgatagagtaagcatgtacatgcatgcatacactttatacagtgctgtcagaccatttggttgcagtgtcatattgtccagttatgaagataatgacccatctatgtttttgattgatccatctggagttagctatggatactttggatgtgctacaggaaaagctaaacagtctgcaaagactgaaatagaaaaattgaagatggggaatttaacatgcaaagaacttgttaaagaagcagccaaaataatttatttggtccatgatgaattgaaggataagaattttgaactggaactttcatgggtatgcaaagatacaaatggtttacataccaaagtgcctgagtcagtgtttgctgatgcagaaaaggctgctaagcaagcaatggaagcagattcagaatcagatacagaagatatgtaataactacatttagtttttaatatttcactgatggtggctgttcttacaatattcgtgtgttatgtctataaattatgtaatactgtgagaatttccatttcaatgataggtttataactttttttctaataaatacataattttaaaaaa

SEQ ID NO: 707 - DNA, 795 bp, Diabrotica barberi
  misc_feature (1)..(795): RNAi target sequence ta01738.01_diab
tgacactgcaaccaaatggtctaacagcaccgtaataggccttcgaggtacagacggcattgtattggctgctgaaaagctcattatgtcaaaattgcatgaaccaagtacaaataaacgaattttcaacattgataaacacataggaatggcattttcaggcttaatagctgatgcaaggcaaattgttgagattgctagaaaagaagcatcaaattatagacaccaatatggatcaaatattcctcttaaatacctaaatgatagagtaagcatgtacatgcatgcatacactttatacagtgctgttagaccatttggttgcagtgtcatcttggccagttatgaagatagtgacccatctatgtatctgattgatccgtctggagttagctatggatactttggatgtgctacaggtaaagcaaaacagtctgcaaagactgaaatagaaaaattgaagatggggaatctaacttgcaaagaacttgttaaagaagcagccaaaatcatttatttggtccatgatgagctaaaggataagaattttgaactggaactttcatgggtatgcaaagatacgaatggtttacataccaaagtgcctgaatcagtgtttgctgatgcagaaaaagctgccaaacaagcaatggaagcagattcagaatcagatacagaagatatgtaataactagatacatttagtttttaatatttcgctgatgtggctgttcttacaatatttcatgtgttatgtccatatattatgtaatactgtgagaatttccatttcaa

SEQ ID NO: 708 - DNA, 993 bp, Epilachna varivestis
  misc_feature (1)..(993): RNAi target sequence ta26097.001_epiva
atttgtatatttataatcatagataatatataatatatttaggttttcaatcaagtaataccaaattattaatataaaatgagttctatcggcactggctatgatctttcggcttctcaattttctcctgatggtagagtttttcaagtcgaatatgctatgaaagctgtggaaaatagtggaacagttataggtcttaaaggaactgatggggtagtacttgcagcagaaaaattaatcatgtctaaactacatgaatctggcaccaacaaaagaatttataatatagatacacatattggaatgtgtttttctggtcttattgctgatgctaggcaattagttgatatagcgagaaaggaggcatcaaattatagatcacagtatggtgtaagcattccactcaaatatcttaatgacagagtcagcatgtatatgcacgcatatacactttacagtgctgtaagaccctacggctgtagcattattcttgctagttatgaggaagatcagcctatgatgtatttaattgacccctcaggtgtaaactatggatttaatggttgtgctactggaaaagcaaagcaatctgctaaaacagagattgaaaaactgaaattgggtgagctgagttgcaaagagttggttagagaagctgccaaaattatttacttagtccatgatgagttgaaggataaaaattttgagcttgagttatcatgggtgggaaaagatagcaatggtagacatgaaaaagttcccagccacgttttagctgatgctgagaaagcagcaaaacaagcaatggaggcagattccgattctgatactgaggatttgtagatatacatttgattattttataagtgcagttctaataaagcgtaatttctttcaatgtgtcatcttaaataacgccctttttcttgtaattaacgtcaaagaaaaaactcattacaaacaatttgttctgtaccataatgtgttcattgg

SEQ ID NO: 709 - DNA, 936 bp, Leptinotarsa decemlineata
  misc_feature (1)..(936): RNAi target sequence ta37784.0003_lepde
caactatttgagtatttgacagatgagttgtattttaagaaagaagcaaatcacgctagttcaaaactccaaaactaaatttttaaaatcgaatttaaacagtcaatatgagttcaataggaactgggtatgacttgtcggcttcgcaattctcacctgacggaagagtcttccaagtcgaatacgccatgaaagccgtagaaaacagtgggaccatcattggcctcaagggcactgacggaatcgtcctggcagccgagaagctcatcatgtctaaactgcatgaaccgggaacgaacaggagaatcttcaatatcgatagacatattggaatggcgttctctggcctgatagcggatgctcggcagatcgtcgaaatcgctaggaaagaggcagctaattataggctccagtacggcattaacatacctctgaagtacttgaacgacagagtgagcatgtacatgcatgcatataccttgtacagtgccgttcggccttacggatgcagcgttatattagctagttacgatgaggatgagcctcagatgtacctaattgatccatcaggagttagctatgggtttcacggctgcgcaacagggaaagcgaaacagtcggccaaaaccgaaatagagaagctcaaactaggcaatttgacatgtaaagaattggtgaaagaagcagcaaaaataatatacatggtccatgacgaactcaaagacaaaaactttgaaatggagctttcttggatatgtaaagaaagcaatgggttacacgtgaaagttcctgaatccgtatatttggaggcagaacgggccgccaagcaagccatggaagctgattcggaatcggataacgaggacatgtgaggctttgtcagttagtattaagattatggcttagttgtaagatgtcttggctaaatcttttttt

SEQ ID NO: 710 - DNA, 927 bp, Orius insidiosus
  misc_feature (1)..(927): RNAi target sequence ta09672.01_oriin
aggtaacattacatttgaggccgcatattttgctttatcattactttaaatttaattttacttttatttcttgttaaaacgtttgtttgacatcaaaaatgagttccatcggtaccgggtatgatttgtcggcgtcacaattttcgcccgacggacgagtctttcaagtagaatacgctcagaaagccattgaaaacagtgggacggtaatcggcctgagaggtaaagatggtgttgtcttggctgtcgaaaagcttgtcacgtcgaaactgtatgaaccaggagccaataaaaggatattcactattgacaaacatatcggaatggctgttgctggcttgatatctgatgcgaggcaggtggcggaagtcgctaggaccgaagctgctaattatcgctcccaatacggaagtaacatcccgttgaagtatttgaacgagcgagtctccggttatatgcatgcatatactttatacagcgctgtccgacctttcggctgcagcgtcatcctcagcacttacaacgagcgagatggacccgaaatgtacatgattgacccatcaggtgtctcatacggttatttcggatgcgctgtcggcaaagcgaaacaagccgccaaaaccgaaatcgaaaaattaaaattgaaagatttaacatgcaaagaattagtcaaagaagctgccagaataatttatttggtccatgatgagcttaaagataaacagtttgaacttgaaatgagctggatcggcgctcatacaaacggtgtaaaccaagttgtcccgccgaccgtccacgccgaagctgaaaaagatgcgaaagctgctatggaagaagattcagattctgaaactgaagatatttaacttaattatactatgttctaattaacttttttccattaataactttttttttctattcaaa

SEQ ID NO: 711 - DNA, 1115 bp, Coleomegilla maculata
  misc_feature (1)..(1115): RNAi target sequence ta36121.0001_vibdu
caatgagttgtggatttcagatttgaaggatcatataaaattgtttgcttgaaacataaattacaatttcattctaatttaataaaggaaaaatgagttcaataggcactggttatgatctttctgcgtcacaattctcgccggatggtagagtttttcaagtggaatacgctatgaaagctgttgaaaacagcggaacagtaataggtcttaaaggtacagatggaattgtcctagcagcagagaaattaattacctctaaattacatgaaccaggaacaaataagaggatattcaatatagatacgcatattggaatgtgtttttcgggtttgatagctgatgctaggcaactggtggatatagctagaaaagaagcggctaactatagatcacaatatggtgtgagcattccactgaaataccttaacgatagagtgagcatgtacatgcatgcttacactctatatagtgctatcagaccttatggttgtagtgtaattctagcaagctatgaagaaaatcaaccatttatgtatttgattgatccttctggagttagctatggttacaatgggtgtgctacaggtaaagcgaaacagtcagcaaagaccgaaattgaaaagttaaagttgggcgaattgagctgcaaggaattagttagagaagcggctaaaattatttaccaagtacatgatgaattgaaagataagaattttgaacttgaattatcatgggtaggaaaggatagtaatggtagacatgaaagagtaccaagtcatatttatgctgatgccgaaaaagctgctaaacaagcaatggaagcagattcagattctgatacagaggatttataagttttaactttattatttaagttcactcagaaattaataaatgttttgacttacattttttttaagacattatgttatagccacattttctctatccatttatatcatttatatcaacaattctttaaaactgaaggaccgaaattttagttaacaatactcgataaaatatgaaataatttcaaagcaattgaaagattggttaatataggttgaaatgttttagaggctgcaacagtgatttgtagaattttgcaa

SEQ ID NO: 712 - DNA, 853 bp, Diabrotica undecimpunctata
  misc_feature (1)..(853): RNAi target sequence ta07256.01_diaun
cattattgtaccgtgttgtctagcggatattttagatttaacaatcttattttataaaataattagttaaaatgatgcaaaccgccaataatgtatattatcccgattattccactgctccaatgcaacgtcaaattaatccttatgccgacaatggagggagtgtagtagcaatagcaggtgaagactttgtaataattggtgcagatacacgtttgagtgctggattttccatttacactagagaacaaaacaaactattcccgctatcaggcactacagttttaggctgtgcaggatgttggtgtgatactctaacattaaccagaatccttaaatctcgcatgcagatgtaccaacaagagcataacaaaacaatgtctacaactgcatgtgcccaaatgttgtcaaccatgctctactacaagagattctttccttattatatatcaaacattcttgttggtttagataatgaaggaaagggctgtgtttacagctatgatccaatcggacattgtgaaaaagctacttatagagcaggtggttcggctggagctctgctccaaccccttttggacaatcagattggacaaaagaacatgcttaaaacatctggagaacctcttagtcaggagaaagctttggctacactgaaagatgtatttatttctgctgctgaaagagatatctacactggagatagtgtacttataaatattattactaaagatggagtaaaggaagagtccttccagttgagaagggattagaagcaagtgtttttgtttatattattttcttatgtgtaattcaaatatactttctaaataaacaattttaagataaaaaa

SEQ ID NO: 713 - DNA, 856 bp, Diabrotica barberi
  misc_feature (1)..(856): RNAi target sequence ta07284.01_diab
gcataggggttaatttgacgttgcattggaccagcggattttagattcaacaagcttattttataaaataattagttaaaatgatgcaaacagctaataatgcatattatcccgattattccactgctccaatgcaacgtcaaattaacccctatgcagataatggagggagtgtagtagcaatcgcaggtgaagactttgtaataattggtgcagatacacgtttgagtactggattttccatctataccagagaacaaaacaaacttttcccactatcaggcactacagttttgggttgcgcaggatgttggtgtgacactctaacattaaccagaatccttaaatctcgcatgcagatgtaccaacaagagcataacaaaacaatgtctacaactgcatgtgcccagatgttgtctaccatgctctactacaagagattctttccttattatatatcaaacattctagtaggtttagataatgaaggaaagggctgtgtttacagctatgatcctattggacattgtgaaaaagctacgtatagagcaggtggttcagctggagctcttcttcagcctctgttggacaatcaaattggacagaagaacatgcttaaaacatctggagaacctcttagtcaggagaaagctttgtctacccttaaagatgtatttatttctgctgctgaaagagacatctacactggagatagcgtacttataaatattattactaaagatggagtaaaggaagagtccttccagttgagacgggattagaagcaagtggttttgtttatattttcttatgtgtaattcaaattaatatactttctaaataaacaattttaagt

SEQ ID NO: 714 - DNA, 796 bp, Epilachna varivestis
  misc_feature (1)..(796): RNAi target sequence ta27792.001_epiva
agtgagtttgttgttctagtagagtaaataccgaataaaaatgcattcaataatgaatgattctcgtccatttttcgaagattattctgttaagccaatgcagcgtcaattcagcccctacgctgataatggagggagcattattgcaatttctggtaacgacttcgtggtgattggtgcagatactcgtttgagttctggattttcgatatacactcgggatcaaaataagttattcaaactctcagataatacagttttgggatgttctggatgttggtgtgatactctttctttaactcgtattttgaacgcacgtatgcaaatgtatgaacaagaacacaataagaaaatgtccactccagcttgtgctcaaatgttatcgaccatgttatattacaagcgattctttccgtattacatttctaacatattagttggtttggattctgagggaaaaggatgtgtttatagttacgatcctattggtcatactgaaagatctagttatagagctggaggatcagcaggtgccttactacaacccctcttagataatcaagttggtatgaaaaatatccagaatgcacataatgaaccactaactattgaaagagctgttggaattttaaaggatacatttatatctgcagctgaaagagatatttatacaggtgatagcattaagatcaatgtcatcactaaagatggcatcaaagaagatacttttgagttgaggaaagattaaattgtatactttttaatatcttcaataaaaatttaattataaaaaaaa

SEQ ID NO: 715 - DNA, 842 bp, Leptinotarsa decemlineata
  misc_feature (1)..(842): RNAi target sequence ta37916.0001_lepde
tttttttatattttcggcttgtcattctagttgacttgtttaaaagtagaaagtatttgtgtttcctccactataaaatgcaaacagcaatgaacgcttattatcctgattattcaacggtaccggttcagcagtctttcagcccctatgctgataatggagggagcgtagtggccatagctggagatgatttcgtggtagtgggagcagatacacgtctaagcgccggcttctccatctacactagagaccaaaataagttgtttcctctttcaaaaacaacggttctcggatgctcaggttgctggtgtgacacgctaacgttaactcgtattttgaagtctcgcatgcagatgtacgagcaggagcataataaagtaatgtcgaccactgcttgcgcgcagatgctctccaccatgctctactacaaacgcttttttccttattacatctctaatgttctcgtgggtctcgacaacgaaggaaaaggttgtgtttacagctacgaccctattggacattgtgaaaagactacgtacagagctggtggttctgctggggctctgctccagcctctgttggataatcaaatcggacagaagaatatggagatagtgtctaccgagcccttgtcgaaagagagagctctggctatattgaaggatgtcttcatctctgcagccgagagagacatatacaccggagatagtgtttctatcaatatcataactaaggatggtgtgaaagaggaatcatttgaattgaggaaagattagaggaattttatattgaattttccttcatgaatttttgattatatgatttaagtaaaaaaaaaagtc

SEQ ID NO: 716 - DNA, 755 bp, Orius insidiosus
  misc_feature (1)..(755): RNAi target sequence ta09310.01_oriin
cgcttccgatactcgtttgagccaaagcgaaaaatttttgtttggtcatctgctgtacggtattagctgaagaaatgtctttttcaccgtattctgataatggagggagcatcgttgctgtcgccggtgacgattattcgatcatcgcttccgatactcgtttgagcgctgggtattcgatttatacgcgtgagcagtcgaaattgttcccgctgtcggaaaaagcgattttgggaagcgctggatgttggtgtgacgttctttctcttgctagattgctccagacgcgcattaaaatgtacttgtatgagcataataaggcgatgtcaactccagctatagcgcagatgctatctatcataatgtactataaacgattctttccgtattacacgtcgacaattttggccggattagattccgagggtaaaggaatcgtctacagctacgacccaatcggtcatatggaaagctctaaatatcgtgctgcaggttctgcaggagcacttctccagcctcttcttgacagccagctgggcaagaaaaaccaggagaatgtcgtgaataaatcgtacagcttggaagaagctttggcgatcgtgaaggacacttttatttcggctgctgaaagagatatttatactggagacagcatcgctttagccatcatcactcaagatggcgtcaaaaacgagactttccaactgaggaaagattaaaaacatattatttgtactatttttgctctttttgaa

SEQ ID NO: 717 - DNA, 813 bp, Coleomegilla maculata
  misc_feature (1)..(813): RNAi target sequence ta23917.0001_vibdu
gaaaatgtctataatgaatgattctcgtcctattttcactgattattctcaaaaacctatgcagcgacaatttagtccctatgccgataacggagggagcatcattgctatagctggagacgattttgttgttatcggagcagatactcgcttgagtgctggttattccatatacacccgcgatcaaaataaactctttaaattgtctaacacaacagtattgggttgttctggttgttggtgtgatactcttactctaacaaggattctgaatgcccgtatgcaaatgtatgaacaagagcataataagattatgtctactcctgcttgtgctcaaatgctttcaaccatgctatattataaacgattctttccttactatatatccaatatattggcaggcttggactctgacggaaaaggctgcgtatacagttatgatccaataggtcatacagaacgctctgcttatagagctggtggatccgcaggtgttctactgcaacctcttttagacaaccaaattggccttaaaaatatggttaatactccgaatttgcctctgaccattgaaagagctgttggaattttaaaagacacattcatctctgctgcagaaagagatatacacactggtgatagcatcaaaattaacataataactaaagatggaattaaggaagacacttttgaattgagaaaagattaaacatttttattttttgtcaacaatgggtaaaaattatctaattttgaggatgttattgtgagtgtctctcaagtatttaattataactccgaaatataaaaaaa

SEQ ID NO: 718 - DNA, 785 bp, Diabrotica undecimpunctata
  misc_feature (1)..(785): RNAi target sequence ta08127.01_diaun
tttttttagtgcaaaacttattttttttattttaatatataccaaaacataccaaagcttaaaaaataattaattaaccttcataaaatttgggcaattcatttcctaaaataactcttcgttcaataccagcttcattgataattcccagtctgactacacctcctgaagaaccatctctggacatagcaagtgccaatgtatttgtgacaaacttcacacattcttctttgctcatattgggtttgaaattggcatctacataaccataaacataactggaacctgatcctcctattgacacttcttgcctcacacacatcccaccaattggtatggaatagacttgaccgcctttcttcttatcccaacctgctaccagtattccagccattagtgaatctctataattgtagcaaagttcttggaaaatggcagcacctacttctactttgggttcttcaccaagttccataccatgaaaattaagatgataagcaacaatgtctgcaattgcttgtgtatctgctgcagatccggaacgacaacagtagatatggtcagtgactttggtgagtttgtctgctacacggtttgctatgtaagccccagtagttgtgcgagaatctgctcctataacaacgccgccgtcaaactctgcggccataatagaggtgcctgtactgtgagcagcatctctccaatcatcaggaccagtcattgcaccaaactcattcataagaggcatttttataagtttaatttcaagaatacaagctgagaaa

SEQ ID NO: 719 - DNA, 842 bp, Diabrotica barberi
  misc_feature (1)..(842): RNAi target sequence ta05581.01_diab
tttttggtgtaaacctgatttttttattttaatatataccaaaacataccaaagcttaaaaaataattaattaaccttcataaaatttgggcaattcatttcctaaaacaactcttcgttcaataccagcttcagtgatgatccccagtctgactacacctcctgaagaaccatctcttgacatggcaagtgccaatgtatttgtgacaaacttcacacattcctctttgctcatgttgggcttgaagttggcatctacgtaaccataaacataactggagcctgatcctccaattgacacttcttgtctcacacacatcccaccaattggtatggaatagacttgtccgcctttctttttatcccaacctgctaccagtataccagccattagtgaatctctataattgtagcaaagttcttggaaaatggcggcacctacttgtactttgggttcttcaccaagttccataccatgaaaattaagatgataagcaacaatgtctgcaattgcttgtgtatctgctgcagatcctgaacgacaacagtatatatggtcagtgactttggtgagtttgtctgctacccggtttgcaatgtaagccccggtagttgtgcgagaatctgctcctataacaacgcctccatcaaactctgcggccataatagaggttcctgtactgtgagcggcatctctccaatcattaggagcagtcattgcaccatactcagtcataagaggcattttttacaagtttaatgaaaagaatacaagcttagaaaaattacttgtaatcctacaatccaatattttgccagtcaccagctcctataacaacgcc

SEQ ID NO: 720 - DNA, 935 bp, Epilachna varivestis
  misc_feature (1)..(935): RNAi target sequence ta23856.001_epiva
cgatcttaaaaatcggatttatatcgtgattattgtaataattattctcacagctagccgaataatttcgtttcgcgttactggtaacactgaaaatgcatttttcattttgtggttatgattatttggagaaaaataatttgtcatagtcattgagtacaaattgtgttcgatatatttgcaatattagattcattaaacttgattttatactgaaaatcacaaactaccatcgaaaacatggactccgattggatgaatgcaccacacagtacagggacttctattatggctgctgagtttaatggtggagttgttattggtgccgacactagaacaactacaggggcatacatagccaaccgagtaacggataaactaacaaaagtaacagatcacatttattgttgtcgttctggttcagcagcagatactcaagctattgctgatatagtttcttatcatctaggatttcatggaattgagttgggagaagagccacttgtagaaacaagtgcagctgtgtttcaagaactttgttacagctatcgtgattctttaatggctggaattctagtagcaggttgggataaacgtaaaggtggtcaggtttattctattcctataggtggaatgtgtgtaagacagagcgtatccataggtggttcaggatcaagctatgtttatggttatgttgatgccaattataaacctggaatgtcaaaagaagcttgtgtagactttgtttcaaaaactttggcacttgcaatgtcaagagatggttcttctggtggttgtattcgtattggagtcattacaaaggatggcattgaacgcaaggttattctgggttctgaggtccctaaattctatgaagattgattttatttgtattcaattaaataataaataaaaatgttaacatctaaaaaaaa

SEQ ID NO: 721 - DNA, 1264 bp, Leptinotarsa decemlineata
  misc_feature (1)..(1264): RNAi target sequence ta33564.0001_lepde
tttacataattacggaatactgtgccatagattacagaaatttaaattttagtgttctgtggttctaacctagcaaataatttgtagagtcattttttgacttattttttgttagtgattttgtattcagattgtctccgttcgtaaaaatgctactgaatcaaatatccatagcaggtgccgatgactggagaaatgccgctcatagcactgggacttctattatggcagcagaattcgatggaggagtaattattggtgctgattcccgtacaactacaggggcgtacattgcaaatcgtgtaactgacaaactaactaaagtaactgaccatatatattgttgtcgatctggatcagcagcagatactcaagccattgctgatattgtatcgtaccatctgaacttccatggtatggaactaggagaagagccccttgtagaggtgggggctgctatcttcagggagctttgctacaactatagggattctctcatggcgggaatcctagttgctggctgggacaaaaaaaaggggggacaaatttattctattcctatcggagggatgtgtgttaggcaagcggtttctattggaggttcaggttccagttatgtttatggttatgtagatgctaatttcaaacccaagatgtcaaaggaggaatgtgcgaaatttgtcacaaatactctggctcttgcaatgtctagagatggatcatctggaggtgttatccgtctaggtataattacggagtcgggaattgaacgtcgtgtcatcttaggcgatgatctacccaagttctatgaaggatagagcatataataatcataatttttcattttgtaattggtgtcaataaatcaaataaaataaggttttctttaaaaaacaattatatgattataaaatacatgttaatgaacaatgaatttgaaagagaaaaaagatggttgtgtaccatgaaggcactaattcgtatctttattaatgtagtctgtatttttagagagaatcgtgacaaaattagtcgcatggcgccatttggcaccaacatattttgaattcctttattttttctggaactctggtaataaaattatttctgttatatcttagtattcaaaatgccactgaaaaaattgaatcattattttcttaccaattctttttcttaagaagatatcgttacagcactaccatcaccacaaacagatttaccattttttttgtcaaccttctaaattttacagtaaatgtat

SEQ ID NO: 722 - DNA, 912 bp, Orius insidiosus
  misc_feature (1)..(912): RNAi target sequence ta09100.01_oriin
ttcagaattagctatttaaccgaaggcgactcagcgaatttactaagtgaaggtgaactattctgtggagaaaaatggccaaagtcgctgttcatcatgatcgtttcggtgcccctgcaatgactgaggaaccagtttctactggaactacaattatggcttgtacttttgacggaggcgtcatcatcggtgcggattctaggacgagtagcggaccttacgtcgccaatcgcgtttccgacaaactgacaaaaatctccgatcacatttactgttgtaggtcaggatcggccgctgacactcaagctatcgctgatatcgtcaaatatcacctttctttttttaagcttgaaactggtgaagaaccgcttgttgcaactgctgcagcgattttccgtgagctttgttataactacagaaatcgcttgatggctggcatcatcgtcgctggatgggacagagttaaaggcggacaggtttatacgatacctttgggtggtatgataatcgagcagaaattcgcaatgggcggttctggaagttcttatgtttatggcttcactgatgccaactatagagaaaacatgagttcagaagaatgcaaacagttcattaaacaagcaatcgctcttgccattcgtcgtgacggctcttccggaggtgtcataagaatgggtctcatcacaaaagatggtattaaacgagaaattttttcgggtaaagattacccttcatatttaactccagctaaagattagaatatctttttgtattccttgagctgtaaaatttaagtacattcatttataactttttgaaatgattttctttcatttattaacaaaataatccagtactaataatactccagcaagtactatttcaatacacatctttatcacaaaggcaaaa

SEQ ID NO: 723 - DNA, 686 bp, Coleomegilla maculata
cctcacagtacaggaacctctatcatggctgctgaatttgagggtggtgtagtaattggtgctgattctagaaccaccacaggaacatatattgccaatcgagtaactgataagcttacaaaaataactgatcgtatatattgttgtcgatctggttcagctgctgatacccaagccattgcagatattgtatcttatcatttaggtttccatgggatggaattgggagaagaaccacttgtagaaactagtgctgcagtattccaagaactatgctataattatcgagattctttgatggctggtatacttgtagcaggatgggataagcgaaagggaggtcaaatttactcaattcctattgggggaatgtgtgtgaggcaaaaagtctctattggaggttctggttctggttttgtatacggctatgtagatgctaactataagtctggaatgactaaagaagcttgcgttgatttcgtaattaaaactttggcacttgctatgtcgagagatggctcatcaggtggttgtgttaggattggagttataactaaagatggtatcgaacgtaaagtaattttgggtacagaattacccaaattttatgaagattaatatttcataatatattttgtcttaattcaatacttcattcaataaaattatgaaattttcgaaaaaaa

SEQ ID NO: 724 - protein, 159 aa, Diabrotica virgifera
  misc (1)..(159): WCRW-Ryanr
MTSIETVGTIVLKLLKLVINLICLILYRTGYQGYFLGVGGTWNLNEEKNPDAEIVASGVFVGFMIYTFVSLISLCFASGDHKTTFTDILMNIVGIFMWIAAGATALHYWLGYLSEYKYTTIDSERQVGLALGAMCIINGAVYLVDGVLSAIFILKAKMQ

SEQ ID NO: 725 - protein, 162 aa, Drosophila melanogaster
  misc (1)..(162): Drosophila Ssk
MVSVETVGSIFIKALKLIINLVIIFLYRWGDGGEFLGIGGTWNLNEEKSADAEIVASGVMVGFLIYTGCHTIAFAFGTTKHKGELCDTIMNVVGCIMWIAVGGVALHYWKGYMSDEGFLYVNSERQVGIAMGSLCVIEGALYLLDTVLACIHYSKGDTDYTQ

That which is claimed:

1. An isolated polynucleotide comprising a nucleotide sequence comprising:
(a) the nucleotide sequence comprising any one of SEQ ID NOS: 1, 4, 5, 8, 9, 12, 13, 16, 17, 20, 21, 24, 25, 28, 29, 32, 33, 36, 37, 40, 41, 44, 45, 48, 49, 52, 53, 54, 55, 56, 57, 60, 61, 64, 65, 68, 69, 72, 73, 76, 77, 80, 81, 84, 85, 88, 89, 92, 93, 96, 97, 100, 101, 104, 105, 108, 109, 112, 113, 116, 117, 120, 121, 124, 125, 128, 129, 132, 133, 136, 137, 140, 141, 144, 145, 148, 149, 152, 153, 156, 157, 160, 161, 164, 165, 168, 169, 172, 173, 176, 177, 180, 181, 184, 185, 188, 189, 192, 193, 196, 197, 200, 201, 204, 205, 208, 209, 212, 213, 216, 217, 220, 221, 224, 225, 228, 229, 232, 233, 236, 237, 240, 241, 244, 245, 248, 249, 252, 253, 256, 257, 260, 261, 264, 265, 268, 269, 272, 273, 276, 277, 280, 281, 284, 285, 288, 289, 292, 293, 296, 297, 300, 301, 304, 305, 308, 309, 312, 313, 316, 317, 320, 321, 324, 325, 328, 329, 332, 333, 336, 337, 340, 341, 344, 345, 348, 349, 352, 353, 356, 357, 360, 361, 364, 365, 368, 369, 372, 373, 376, 377, 380, 381, 384, 385, 388, 389, 392, 393, 396, 397, 400, 401, 404, 405, 408, 409, 412, 413, 416, 417, 420, 421, 424, 425, 428, 429, 432, 433, 436, 437, 440, 441, 444, 445, 448, 449, 452, 453, 456, 457, 460, 461, 464, 465, 468, 469, 472, 473, 476, 477, 480, 481, 484, 485, 488, 489, 492, 493, 496, 497, 500, 501, 504, 505, 508, 509, 512, 513, 516, 517, 520, 521, 524, 525, 528, 529, 532, 533, 536, 537, 540, 541, 544, 545, 548, 549, 552, 553, 556, 557, 560, 561, 562, 563, 564, 565, 566, 567, 568, 569, 570, 571, 572, 573, 574, 575, 576, 577, 578, 579, 580, 581, 582, 583, 584, 585, 586, 587, 588, 589, 590, 591, 592, 593, 594, 595, 596, 597, 598, 599, 600, 601, 602, 603, 604, 605, 606, 607, 608, 609, 610, 611, 612, 613, 614, 615, 616, 617, 618, 619, 620, 621, 622, 623, 624, 625, 626, 627, 628, 629, 630, 631, 632, 633, 634, 635, 636, 637, 638, 639, 640, 641, 642, 643, 644, 645, 646, 647, 648, 649, 650, 651, 652, 653, 654, 655, 656, 657, 658, 659, 660, 661, 662, 663, 664, 665, 666, 667, 668, 669, 670, 671, 672, 673, 674, 675, 676, 677, 678, 679, 680, 681, 682, 683, 684, 685, 686, 687, 688, 689, 690, 691, 692, 693, 694, 695, 696, 697, 700, 701, 702, 703, 706, 707, 708, 709, 712, 713, 714, 715, 718, 719, 720, 721, or active variants and fragments thereof, and complements thereof, including, for example, SEQ ID NOS: 1, 9, 37, 45, 49, 61, 65, 77, 101, 113, 137, 141, 145, 149, 153, 157, 169, 173, 181, 185, 189, 205, 217, 225, 233, 561, 562, 563, 564, 565, 566, 567, 568, 569, 570, 571, 572, 573, 574, 575, 576, 577, 578, 579, 580, 581, 582, 583, 584, 585, 586, 587, 588, 589, 590, 591, 592, 593, 594, 595, 596, 597, 598, 599, 600, 601, 602, 603, 604, 605, 606, 607, 608, 609, 610, 611, 612, 613, 614, 615, 616, 617, 618, 619, 620, 621, 622, 623, 624, 625, 626, 627, 628, 629, 630, 631, 632, 633, 634, 635, 636, 637, 638, 639, 640, 641, 642, 643, 644, 645, 646, 647, 648, 649, 650, 651, 652, 653, 654, 655, 656, 657, 658, 659, 660, 661, 662, 663, 664, 665, 666, 667, 668, 669, 670, 671, 672, 673, 674, 675, 676, 677, 678, 679, 680, 681, 682, 683, 684, 685, 686, 687, 688, 689, 690, 691, 692, and active variants and fragments thereof, and complements thereof, and SEQ ID NOS: 4, 140, 144, 148, 693, 694, 695, 696, 697, 700, 701, 702, 703, 706, 707, 708, 709, 712, 713, 714, 715, 718, 719, 720, 721 and active variants and fragments thereof, and complements thereof, wherein said polynucleotide encodes a silencing element having insecticidal activity against a Coleoptera plant pest.
(b) the nucleotide sequence comprising at least 90% sequence identity to any one of nucleotides SEQ ID NOS: 1, 4, 5, 8, 9, 12, 13, 16, 17, 20, 21, 24, 25, 28, 29, 32, 33, 36, 37, 40, 41, 44, 45, 48, 49, 52, 53, 54, 55, 56, 57, 60, 61, 64, 65, 68, 69, 72, 73, 76, 77, 80, 81, 84, 85, 88, 89, 92, 93, 96, 97, 100, 101, 104, 105, 108, 109, 112, 113, 116, 117, 120, 121, 124, 125, 128, 129, 132, 133, 136, 137, 140, 141, 144, 145, 148, 149, 152, 153, 156, 157, 160, 161, 164, 165, 168, 169, 172, 173, 176, 177, 180, 181, 184, 185, 188, 189, 192, 193, 196, 197, 200, 201, 204, 205, 208, 209, 212, 213, 216, 217, 220, 221, 224, 225, 228, 229, 232, 233, 236, 237, 240, 241, 244, 245, 248, 249, 252, 253, 256, 257, 260, 261, 264, 265, 268, 269, 272, 273, 276, 277, 280, 281, 284, 285, 288, 289, 292, 293, 296, 297, 300, 301, 304, 305, 308, 309, 312, 313, 316, 317, 320, 321, 324, 325, 328, 329, 332, 333, 336, 337, 340, 341, 344, 345, 348, 349, 352, 353, 356, 357, 360, 361, 364, 365, 368, 369, 372, 373, 376, 377, 380, 381, 384, 385, 388, 389, 392, 393, 396, 397, 400, 401, 404, 405, 408, 409, 412, 413, 416, 417, 420, 421, 424, 425, 428, 429, 432, 433, 436, 437, 440, 441, 444, 445, 448, 449, 452, 453, 456, 457, 460, 461, 464, 465, 468, 469, 472, 473, 476, 477, 480, 481, 484, 485, 488, 489, 492, 493, 496, 497, 500, 501, 504, 505, 508, 509, 512, 513, 516, 517, 520, 521, 524, 525, 528, 529, 532, 533, 536, 537, 540, 541, 544, 545, 548, 549, 552, 553, 556, 557, 560, 561, 562, 563, 564, 565, 566, 567, 568, 569, 570, 571, 572, 573, 574, 575, 576, 577, 578, 579, 580, 581, 582, 583, 584, 585, 586, 587, 588, 589, 590, 591, 592, 593, 594, 595, 596, 597, 598, 599, 600, 601, 602, 603, 604, 605, 606, 607, 608, 609, 610, 611, 612, 613, 614, 615, 616, 617, 618, 619, 620, 621, 622, 623, 624, 625, 626, 627, 628, 629, 630, 631, 632, 633, 634, 635, 636, 637, 638, 639, 640, 641, 642, 643, 644, 645, 646, 647, 648, 649, 650, 651, 652, 653, 654, 655, 656, 657, 658, 659, 660, 661, 662, 663, 664, 665, 666, 667, 668, 669, 670, 671, 672, 673, 674, 675, 676, 677, 678, 679, 680, 681, 682, 683, 684, 685, 686, 687, 688, 689, 690, 691, 692, 693, 694, 695, 696, 697, 700, 701, 702, 703, 706, 707, 708, 709, 712, 713, 714, 715, 718, 719, 720, 721, or active variants and fragments thereof, and complements thereof, including, for example, SEQ ID NOS: 1, 9, 37, 45, 49, 61, 65, 77, 101, 113, 137, 141, 145, 149, 153, 157, 169, 173, 181, 185, 189, 205, 217, 225, 233, 561, 562, 563, 564, 565, 566, 567, 568, 569, 570, 571, 572, 573, 574, 575, 576, 577, 578, 579, 580, 581, 582, 583, 584, 585, 586, 587, 588, 589, 590, 591, 592, 593, 594, 595, 596, 597, 598, 599, 600, 601, 602, 603, 604, 605, 606, 607, 608, 609, 610, 611, 612, 613, 614, 615, 616, 617, 618, 619, 620, 621, 622, 623, 624, 625, 626, 627, 628, 629, 630, 631, 632, 633, 634, 635, 636, 637, 638, 639, 640, 641, 642, 643, 644, 645, 646, 647, 648, 649, 650, 651, 652, 653, 654, 655, 656, 657, 658, 659, 660, 661, 662, 663, 664, 665, 666, 667, 668, 669, 670, 671, 672, 673, 674, 675, 676, 677, 678, 679, 680, 681, 682, 683, 684, 685, 686, 687, 688, 689, 690, 691, 692, and active variants and fragments thereof, and complements thereof, and SEQ ID NOS: 4, 140, 144, 148, 693, 694, 695, 696, 697, 700, 701, 702, 703, 706, 707, 708, 709, 712, 713, 714, 715, 718, 719, 720, 721 and active variants and fragments thereof, and complements thereof, wherein said polynucleotide encodes a silencing element having insecticidal activity against a Coleoptera plant pest; or
(c) the nucleotide sequence comprising at least 19 consecutive nucleotides of any one of SEQ ID NOS: 1, 4, 5, 8, 9, 12, 13, 16, 17, 20, 21, 24, 25, 28, 29, 32, 33, 36, 37, 40, 41, 44, 45, 48, 49, 52, 53, 54, 55, 56, 57, 60, 61, 64, 65, 68, 69, 72, 73, 76, 77, 80, 81, 84, 85, 88, 89, 92, 93, 96, 97, 100, 101, 104, 105, 108, 109, 112, 113, 116, 117, 120, 121, 124, 125, 128, 129, 132, 133, 136, 137, 140, 141, 144, 145, 148, 149, 152, 153, 156, 157, 160, 161, 164, 165, 168, 169, 172, 173, 176, 177, 180, 181, 184, 185, 188, 189, 192, 193, 196, 197, 200, 201, 204, 205, 208, 209, 212, 213, 216, 217, 220, 221, 224, 225, 228, 229, 232, 233, 236, 237, 240, 241, 244, 245, 248, 249, 252, 253, 256, 257, 260, 261, 264, 265, 268, 269, 272, 273, 276, 277, 280, 281, 284, 285, 288, 289, 292, 293, 296, 297, 300, 301, 304, 305, 308, 309, 312, 313, 316, 317, 320, 321, 324, 325, 328, 329, 332, 333, 336, 337, 340, 341, 344, 345, 348, 349, 352, 353, 356, 357, 360, 361, 364, 365, 368, 369, 372, 373, 376, 377, 380, 381, 384, 385, 388, 389, 392, 393, 396, 397, 400, 401, 404, 405, 408, 409, 412, 413, 416, 417, 420, 421, 424, 425, 428, 429, 432, 433, 436, 437, 440, 441, 444, 445, 448, 449, 452, 453, 456, 457, 460, 461, 464, 465, 468, 469, 472, 473, 476, 477, 480, 481, 484, 485, 488, 489, 492, 493, 496, 497, 500, 501, 504, 505, 508, 509, 512, 513, 516, 517, 520, 521, 524, 525, 528, 529, 532, 533, 536, 537, 540, 541, 544, 545, 548, 549, 552, 553, 556, 557, 560, 561, 562, 563, 564, 565, 566, 567, 568, 569, 570, 571, 572, 573, 574, 575, 576, 577, 578, 579, 580, 581, 582, 583, 584, 585, 586, 587, 588, 589, 590, 591, 592, 593, 594, 595, 596, 597, 598, 599, 600, 601, 602, 603, 604, 605, 606, 607, 608, 609, 610, 611, 612, 613, 614, 615, 616, 617, 618, 619, 620, 621, 622, 623, 624, 625, 626, 627, 628, 629, 630, 631, 632, 633, 634, 635, 636, 637, 638, 639, 640, 641, 642, 643, 644, 645, 646, 647, 648, 649, 650, 651, 652, 653, 654, 655, 656, 657, 658, 659, 660, 661, 662, 663, 664, 665, 666, 667, 668, 669, 670, 671, 672, 673, 674, 675, 676, 677, 678, 679, 680, 681, 682, 683, 684, 685, 686, 687, 688, 689, 690, 691, 692, 693, 694, 695, 696, 697, 700, 701, 702, 703, 706, 707, 708, 709, 712, 713, 714, 715, 718, 719, 720, 721, or active variants and fragments thereof, and complements thereof, including, for example, SEQ ID NOS: 1, 9, 37, 45, 49, 61, 65, 77, 101, 113, 137, 141, 145, 149, 153, 157, 169, 173, 181, 185, 189, 205, 217, 225, 233, 561, 562, 563, 564, 565, 566, 567, 568, 569, 570, 571, 572, 573, 574, 575, 576, 577, 578, 579, 580, 581, 582, 583, 584, 585, 586, 587, 588, 589, 590, 591, 592, 593, 594, 595, 596, 597, 598, 599, 600, 601, 602, 603, 604, 605, 606, 607, 608, 609, 610, 611, 612, 613, 614, 615, 616, 617, 618, 619, 620, 621, 622, 623, 624, 625, 626, 627, 628, 629, 630, 631, 632, 633, 634, 635, 636, 637, 638, 639, 640, 641, 642, 643, 644, 645, 646, 647, 648, 649, 650, 651, 652, 653, 654, 655, 656, 657, 658, 659, 660, 661, 662, 663, 664, 665, 666, 667, 668, 669, 670, 671, 672, 673, 674, 675, 676, 677, 678, 679, 680, 681, 682, 683, 684, 685, 686, 687, 688, 689, 690, 691, 692, and active variants and fragments thereof, and complements thereof, and SEQ ID NOS: 4, 140, 144, 148, 693, 694, 695, 696, 697, 700, 701, 702, 703, 706, 707, 708, 709, 712, 713, 714, 715, 718, 719, 720, 721 and active variants and fragments thereof, and complements thereof; wherein said polynucleotide encodes a silencing element having insecticidal activity against a Coleoptera plant pest.

2. The isolated polynucleotide of claim 1, wherein said Coleoptera plant pest is a Diabrotica plant pest.

3. An expression cassette comprising the polynucleotide of claim 1.

4. The expression cassette of claim 3, wherein said polynucleotide is operably linked to a heterologous promoter.

5. The expression cassette of claim 3, wherein said polynucleotide is expressed as a double stranded RNA.

6. The expression cassette of claim 3, wherein said polynucleotide comprise a silencing element which is expressed as a hairpin RNA.

7. The expression cassette of claim 6, wherein the silencing element comprises, in the following order, a first segment, a second segment, and a third segment, wherein
a) said first segment comprises at least about 19 nucleotides having at least 90% sequence complementarity to a target sequence set forth in any one of SEQ ID NOS: 1, 4, 5, 8, 9, 12, 13, 16, 17, 20, 21, 24, 25, 28, 29, 32, 33, 36, 37, 40, 41, 44, 45, 48, 49, 52, 53, 54, 55, 56, 57, 60, 61, 64, 65, 68, 69, 72, 73, 76, 77, 80, 81, 84, 85, 88, 89, 92, 93, 96, 97, 100, 101, 104, 105, 108, 109, 112, 113, 116, 117, 120, 121, 124, 125, 128, 129, 132, 133, 136, 137, 140, 141, 144, 145, 148, 149, 152, 153, 156, 157, 160, 161, 164, 165, 168, 169, 172, 173, 176, 177, 180, 181, 184, 185, 188, 189, 192, 193, 196, 197, 200, 201, 204, 205, 208, 209, 212, 213, 216, 217, 220, 221, 224, 225, 228, 229, 232, 233, 236, 237, 240, 241, 244, 245, 248, 249, 252, 253, 256, 257, 260, 261, 264, 265, 268, 269, 272, 273, 276, 277, 280, 281, 284, 285, 288, 289, 292, 293, 296, 297, 300, 301, 304, 305, 308, 309, 312, 313, 316, 317, 320, 321, 324, 325, 328, 329, 332, 333, 336, 337, 340, 341, 344, 345, 348, 349, 352, 353, 356, 357, 360, 361, 364, 365, 368, 369, 372, 373, 376, 377, 380, 381, 384, 385, 388, 389, 392, 393, 396, 397, 400, 401, 404, 405, 408, 409, 412, 413, 416, 417, 420, 421, 424, 425, 428, 429, 432, 433, 436, 437, 440, 441, 444, 445, 448, 449, 452, 453, 456, 457, 460, 461, 464, 465, 468, 469, 472, 473, 476, 477, 480, 481, 484, 485, 488, 489, 492, 493, 496, 497, 500, 501, 504, 505, 508, 509, 512, 513, 516, 517, 520, 521, 524, 525, 528, 529, 532, 533, 536, 537, 540, 541, 544, 545, 548, 549, 552, 553, 556, 557, 560, 561, 562, 563, 564, 565, 566, 567, 568, 569, 570, 571, 572, 573, 574, 575, 576, 577, 578, 579, 580, 581, 582, 583, 584, 585, 586, 587, 588, 589, 590, 591, 592, 593, 594, 595, 596, 597, 598, 599, 600, 601, 602, 603, 604, 605, 606, 607, 608, 609, 610, 611, 612, 613, 614, 615, 616, 617, 618, 619, 620, 621, 622, 623, 624, 625, 626, 627, 628, 629, 630, 631, 632, 633, 634, 635, 636, 637, 638, 639, 640, 641, 642, 643, 644, 645, 646, 647, 648, 649, 650, 651, 652, 653, 654, 655, 656, 657, 658, 659, 660, 661, 662, 663, 664, 665, 666, 667, 668, 669, 670, 671, 672, 673, 674, 675, 676, 677, 678, 679, 680, 681, 682, 683, 684, 685, 686, 687, 688, 689, 690, 691, 692, 693, 694, 695, 696, 697, 700, 701, 702, 703, 706, 707, 708, 709, 712, 713, 714, 715, 718, 719, 720, 721, or active variants and fragments thereof, and complements thereof, including, for example, SEQ ID NOS: 1, 9, 37, 45, 49, 61, 65, 77, 101, 113, 137, 141, 145, 149, 153, 157, 169, 173, 181, 185, 189, 205, 217, 225, 233, 561, 562, 563, 564, 565, 566, 567, 568, 569, 570, 571, 572, 573, 574, 575, 576, 577, 578, 579, 580, 581, 582, 583, 584, 585, 586, 587, 588, 589, 590, 591, 592, 593, 594, 595, 596, 597, 598, 599, 600, 601, 602, 603, 604, 605, 606, 607, 608, 609, 610, 611, 612, 613, 614, 615, 616, 617, 618, 619, 620, 621, 622, 623, 624, 625, 626, 627, 628, 629, 630, 631, 632, 633, 634, 635, 636, 637, 638, 639, 640, 641, 642, 643, 644, 645, 646, 647, 648, 649, 650, 651, 652, 653, 654, 655, 656, 657, 658, 659, 660, 661, 662, 663, 664, 665, 666, 667, 668, 669, 670, 671, 672, 673, 674, 675, 676, 677, 678, 679, 680, 681, 682, 683, 684, 685, 686, 687, 688, 689, 690, 691, 692, and active variants and fragments thereof, and complements thereof, and SEQ ID NOS: 4, 140, 144, 148, 693, 694, 695, 696, 697, 700, 701, 702, 703, 706, 707, 708, 709, 712, 713, 714, 715, 718, 719, 720, 721 and active variants and fragments thereof, and complements thereof;
b) said second segment comprises a loop of sufficient length to allow the silencing element to be transcribed as a hairpin RNA; and,
c) said third segment comprises at least about 19 nucleotides having at least 85% complementarity to the first segment.

8. The expression cassette of claim 3, wherein said polynucleotide is flanked by a first operably linked convergent promoter at one terminus of the polynucleotide and a second operably linked convergent promoter at the opposing terminus of the polynucleotide, wherein the first and the second convergent promoters are capable of driving expression of the polynucleotide.

9. A host cell comprising a heterologous expression cassette of claim 3.

10. A plant cell having stably incorporated into its genome a heterologous polynucleotide comprising a silencing element, wherein said silencing element comprises
a) a fragment of at least 19 consecutive nucleotides of any one SEQ ID NOS: 1, 4, 5, 8, 9, 12, 13, 16, 17, 20, 21, 24, 25, 28, 29, 32, 33, 36, 37, 40, 41, 44, 45, 48, 49, 52, 53, 54, 55, 56, 57, 60, 61, 64, 65, 68, 69, 72, 73, 76, 77, 80, 81, 84, 85, 88, 89, 92, 93, 96, 97, 100, 101, 104, 105, 108, 109, 112, 113, 116, 117, 120, 121, 124, 125, 128, 129, 132, 133, 136, 137, 140, 141, 144, 145, 148, 149, 152, 153, 156, 157, 160, 161, 164, 165, 168, 169, 172, 173, 176, 177, 180, 181, 184, 185, 188, 189, 192, 193, 196, 197, 200, 201, 204, 205, 208, 209, 212, 213, 216, 217, 220, 221, 224, 225, 228, 229, 232, 233, 236, 237, 240, 241, 244, 245, 248, 249, 252, 253, 256, 257, 260, 261, 264, 265, 268, 269, 272, 273, 276, 277, 280, 281, 284, 285, 288, 289, 292, 293, 296, 297, 300, 301, 304, 305, 308, 309, 312, 313, 316, 317, 320, 321, 324, 325, 328, 329, 332, 333, 336, 337, 340, 341, 344, 345, 348, 349, 352, 353, 356, 357, 360, 361, 364, 365, 368, 369, 372, 373, 376, 377, 380, 381, 384, 385, 388, 389, 392, 393, 396, 397, 400, 401, 404, 405, 408, 409, 412, 413, 416, 417, 420, 421, 424, 425, 428, 429, 432, 433, 436, 437, 440, 441, 444, 445, 448, 449, 452, 453, 456, 457, 460, 461, 464, 465, 468, 469, 472, 473, 476, 477, 480, 481, 484, 485, 488, 489, 492, 493, 496, 497, 500, 501, 504, 505, 508, 509, 512, 513, 516, 517, 520, 521, 524, 525, 528, 529, 532, 533, 536, 537, 540, 541, 544, 545, 548, 549, 552, 553, 556, 557, 560, 561, 562, 563, 564, 565, 566, 567, 568, 569, 570, 571, 572, 573, 574, 575, 576, 577, 578, 579, 580, 581, 582, 583, 584, 585, 586, 587, 588, 589, 590, 591, 592, 593, 594, 595, 596, 597, 598, 599, 600, 601, 602, 603, 604, 605, 606, 607, 608, 609, 610, 611, 612, 613, 614, 615, 616, 617, 618, 619, 620, 621, 622, 623, 624, 625, 626, 627, 628, 629, 630, 631, 632, 633, 634, 635, 636, 637, 638, 639, 640, 641, 642, 643, 644, 645, 646, 647, 648, 649, 650, 651, 652, 653, 654, 655, 656, 657, 658, 659, 660, 661, 662, 663, 664, 665, 666, 667, 668, 669, 670, 671, 672, 673, 674, 675, 676, 677, 678, 679, 680, 681, 682, 683, 684, 685, 686, 687, 688, 689, 690, 691, 692, 693, 694, 695, 696, 697, 700, 701, 702, 703, 706, 707, 708, 709, 712, 713, 714, 715, 718, 719, 720, 721, or active variants and fragments thereof, and complements thereof, including, for example, SEQ ID NOS: 1, 9, 37, 45, 49, 61, 65, 77, 101, 113, 137, 141, 145, 149, 153, 157, 169, 173, 181, 185, 189, 205, 217, 225, 233, 561, 562, 563, 564, 565, 566, 567, 568, 569, 570, 571, 572, 573, 574, 575, 576, 577, 578, 579, 580, 581, 582, 583, 584, 585, 586, 587, 588, 589, 590, 591, 592, 593, 594, 595, 596, 597, 598, 599, 600, 601, 602, 603, 604, 605, 606, 607, 608, 609, 610, 611, 612, 613, 614, 615, 616, 617, 618, 619, 620, 621, 622, 623, 624, 625, 626, 627, 628, 629, 630, 631, 632, 633, 634, 635, 636, 637, 638, 639, 640, 641, 642, 643, 644, 645, 646, 647, 648, 649, 650, 651, 652, 653, 654, 655, 656, 657, 658, 659, 660, 661, 662, 663, 664, 665, 666, 667, 668, 669, 670, 671, 672, 673, 674, 675, 676, 677, 678, 679, 680, 681, 682, 683, 684, 685, 686, 687, 688, 689, 690, 691, 692, and active variants and fragments thereof, and complements thereof, and SEQ ID NOS: 4, 140, 144, 148, 693, 694, 695, 696, 697, 700, 701, 702, 703, 706, 707, 708, 709, 712, 713, 714, 715, 718, 719, 720, 721 and active variants and fragments thereof, and complements thereof; or,
b) the nucleotide sequence comprising at least 90% sequence identity to any one of SEQ ID NOS: 1, 4, 5, 8, 9, 12, 13, 16, 17, 20, 21, 24, 25, 28, 29, 32, 33, 36, 37, 40, 41, 44, 45, 48, 49, 52, 53, 54, 55, 56, 57, 60, 61, 64, 65, 68, 69, 72, 73, 76, 77, 80, 81, 84, 85, 88, 89, 92, 93, 96, 97, 100, 101, 104, 105, 108, 109, 112, 113, 116, 117, 120, 121, 124, 125, 128, 129, 132, 133, 136, 137, 140, 141, 144, 145, 148, 149, 152, 153, 156, 157, 160, 161, 164, 165, 168, 169, 172, 173, 176, 177, 180, 181, 184, 185, 188, 189, 192, 193, 196, 197, 200, 201, 204, 205, 208, 209, 212, 213, 216, 217, 220, 221, 224, 225, 228, 229, 232, 233, 236, 237, 240, 241, 244, 245, 248, 249, 252, 253, 256, 257, 260, 261, 264, 265, 268, 269, 272, 273, 276, 277, 280, 281, 284, 285, 288, 289, 292, 293, 296, 297, 300, 301, 304, 305, 308, 309, 312, 313, 316, 317, 320, 321, 324, 325, 328, 329, 332, 333, 336, 337, 340, 341, 344, 345, 348, 349, 352, 353, 356, 357, 360, 361, 364, 365, 368, 369, 372, 373, 376, 377, 380, 381, 384, 385, 388, 389, 392, 393, 396, 397, 400, 401, 404, 405, 408, 409, 412, 413, 416, 417, 420, 421, 424, 425, 428, 429, 432, 433, 436, 437, 440, 441, 444, 445, 448, 449, 452, 453, 456, 457, 460, 461, 464, 465, 468, 469, 472, 473, 476, 477, 480, 481, 484, 485, 488, 489, 492, 493, 496, 497, 500, 501, 504, 505, 508, 509, 512, 513, 516, 517, 520, 521, 524, 525, 528, 529, 532, 533, 536, 537, 540, 541, 544, 545, 548, 549, 552, 553, 556, 557, 560, 561, 562, 563, 564, 565, 566, 567, 568, 569, 570, 571, 572, 573, 574, 575, 576, 577, 578, 579, 580, 581, 582, 583, 584, 585, 586, 587, 588, 589, 590, 591, 592, 593, 594, 595, 596, 597, 598, 599, 600, 601, 602, 603, 604, 605, 606, 607, 608, 609, 610, 611, 612, 613, 614, 615, 616, 617, 618, 619, 620, 621, 622, 623, 624, 625, 626, 627, 628, 629, 630, 631, 632, 633, 634, 635, 636, 637, 638, 639, 640, 641, 642, 643, 644, 645, 646, 647, 648, 649, 650, 651, 652, 653, 654, 655, 656, 657, 658, 659, 660, 661, 662, 663, 664, 665, 666, 667, 668, 669, 670, 671, 672, 673, 674, 675, 676, 677, 678, 679, 680, 681, 682, 683, 684, 685, 686, 687, 688, 689, 690, 691, 692, 693, 694, 695, 696, 697, 700, 701, 702, 703, 706, 707, 708, 709, 712, 713, 714, 715, 718, 719, 720, 721, or active variants and fragments thereof, and complements thereof, including, for example, SEQ ID NOS: 1, 9, 37, 45, 49, 61, 65, 77, 101, 113, 137, 141, 145, 149, 153, 157, 169, 173, 181, 185, 189, 205, 217, 225, 233, 561, 562, 563, 564, 565, 566, 567, 568, 569, 570, 571, 572, 573, 574, 575, 576, 577, 578, 579, 580, 581, 582, 583, 584, 585, 586, 587, 588, 589, 590, 591, 592, 593, 594, 595, 596, 597, 598, 599, 600, 601, 602, 603, 604, 605, 606, 607, 608, 609, 610, 611, 612, 613, 614, 615, 616, 617, 618, 619, 620, 621, 622, 623, 624, 625, 626, 627, 628, 629, 630, 631, 632, 633, 634, 635, 636, 637, 638, 639, 640, 641, 642, 643, 644, 645, 646, 647, 648, 649, 650, 651, 652, 653, 654, 655, 656, 657, 658, 659, 660, 661, 662, 663, 664, 665, 666, 667, 668, 669, 670, 671, 672, 673, 674, 675, 676, 677, 678, 679, 680, 681, 682, 683, 684, 685, 686, 687, 688, 689, 690, 691, 692, and active variants and fragments thereof, and complements thereof, and SEQ ID NOS: 4, 140, 144, 148, 693, 694, 695, 696, 697, 700, 701, 702, 703, 706, 707, 708, 709, 712, 713, 714, 715, 718, 719, 720, 721 and active variants and fragments thereof, and complements thereof;
wherein said silencing element, when ingested by a Coleoptera plant pest, reduces the level of a target sequence in said Coleoptera plant pest and thereby controls the Coleoptera plant pest.

11. The plant cell of claim 10, wherein the Coleoptera plant pest is a Diabrotica plant pest.

12. The plant cell of claim 10, wherein said silencing element comprises
a) a polynucleotide comprising the sequence set forth in any one of SEQ ID NOS: 1, 4, 5, 8, 9, 12, 13, 16, 17, 20, 21, 24, 25, 28, 29, 32, 33, 36, 37, 40, 41, 44, 45, 48, 49, 52, 53, 54, 55, 56, 57, 60, 61, 64, 65, 68, 69, 72, 73, 76, 77, 80, 81, 84, 85, 88, 89, 92, 93, 96, 97, 100, 101, 104, 105, 108, 109, 112, 113, 116, 117, 120, 121, 124, 125, 128, 129, 132, 133, 136, 137, 140, 141, 144, 145, 148, 149, 152, 153, 156, 157, 160, 161, 164, 165, 168, 169, 172, 173, 176, 177, 180, 181, 184, 185, 188, 189, 192, 193, 196, 197, 200, 201, 204, 205, 208, 209, 212, 213, 216, 217, 220, 221, 224, 225, 228, 229, 232, 233, 236, 237, 240, 241, 244, 245, 248, 249, 252, 253, 256, 257, 260, 261, 264, 265, 268, 269, 272, 273, 276, 277, 280, 281, 284, 285, 288, 289, 292, 293, 296, 297, 300, 301, 304, 305, 308, 309, 312, 313, 316, 317, 320, 321, 324, 325, 328, 329, 332, 333, 336, 337, 340, 341, 344, 345, 348, 349, 352, 353, 356, 357, 360, 361, 364, 365, 368, 369, 372, 373, 376, 377, 380, 381, 384, 385, 388, 389, 392, 393, 396, 397, 400, 401, 404, 405, 408, 409, 412, 413, 416, 417, 420, 421, 424, 425, 428, 429, 432, 433, 436, 437, 440, 441, 444, 445, 448, 449, 452, 453, 456, 457, 460, 461, 464, 465, 468, 469, 472, 473, 476, 477, 480, 481, 484, 485, 488, 489, 492, 493, 496, 497, 500, 501, 504, 505, 508, 509, 512, 513, 516, 517, 520, 521, 524, 525, 528, 529, 532, 533, 536, 537, 540, 541, 544, 545, 548, 549, 552, 553, 556, 557, 560, 561, 562, 563, 564, 565, 566, 567, 568, 569, 570, 571, 572, 573, 574, 575, 576, 577, 578, 579, 580, 581, 582, 583, 584, 585, 586, 587, 588, 589, 590, 591, 592, 593, 594, 595, 596, 597, 598, 599, 600, 601, 602, 603, 604, 605, 606, 607, 608, 609, 610, 611, 612, 613, 614, 615, 616, 617, 618, 619, 620, 621, 622, 623, 624, 625, 626, 627, 628, 629, 630, 631, 632, 633, 634, 635, 636, 637, 638, 639, 640, 641, 642, 643, 644, 645, 646, 647, 648, 649, 650, 651, 652, 653, 654, 655, 656, 657, 658, 659, 660, 661, 662, 663, 664, 665, 666, 667, 668, 669, 670, 671, 672, 673, 674, 675, 676, 677, 678, 679, 680, 681, 682, 683, 684, 685, 686, 687, 688, 689, 690, 691, 692, 693, 694, 695, 696, 697, 700, 701, 702, 703, 706, 707, 708, 709, 712, 713, 714, 715, 718, 719, 720, 721, or active variants and fragments thereof, and complements thereof, including, for example, SEQ ID NOS: 1, 9, 37, 45, 49, 61, 65, 77, 101, 113, 137, 141, 145, 149, 153, 157, 169, 173, 181, 185, 189, 205, 217, 225, 233, 561, 562, 563, 564, 565, 566, 567, 568, 569, 570, 571, 572, 573, 574, 575, 576, 577, 578, 579, 580, 581, 582, 583, 584, 585, 586, 587, 588, 589, 590, 591, 592, 593, 594, 595, 596, 597, 598, 599, 600, 601, 602, 603, 604, 605, 606, 607, 608, 609, 610, 611, 612, 613, 614, 615, 616, 617, 618, 619, 620, 621, 622, 623, 624, 625, 626, 627, 628, 629, 630, 631, 632, 633, 634, 635, 636, 637, 638, 639, 640, 641, 642, 643, 644, 645, 646, 647, 648, 649, 650, 651, 652, 653, 654, 655, 656, 657, 658, 659, 660, 661, 662, 663, 664, 665, 666, 667, 668, 669, 670, 671, 672, 673, 674, 675, 676, 677, 678, 679, 680, 681, 682, 683, 684, 685, 686, 687, 688, 689, 690, 691, 692, and active variants and fragments thereof, and complements thereof, and SEQ ID NOS: 4, 140, 144, 148, 693, 694, 695, 696, 697, 700, 701, 702, 703, 706, 707, 708, 709, 712, 713, 714, 715, 718, 719, 720, 721 and active variants and fragments thereof, and complements thereof;
b) a polynucleotide comprising at least 130 consecutive nucleotides of the sequence set forth in any one SEQ ID NOS: 1, 4, 5, 8, 9, 12, 13, 16, 17, 20, 21, 24, 25, 28, 29, 32, 33, 36, 37, 40, 41, 44, 45, 48, 49, 52, 53, 54, 55, 56, 57, 60, 61, 64, 65, 68, 69, 72, 73, 76, 77, 80, 81, 84, 85, 88, 89, 92, 93, 96, 97, 100, 101, 104, 105, 108, 109, 112, 113, 116, 117, 120, 121, 124, 125, 128, 129, 132, 133, 136, 137, 140, 141, 144, 145, 148, 149, 152, 153, 156, 157, 160, 161, 164, 165, 168, 169, 172, 173, 176, 177, 180, 181, 184, 185, 188, 189, 192, 193, 196, 197, 200, 201, 204, 205, 208, 209, 212, 213, 216, 217, 220, 221, 224, 225, 228, 229, 232, 233, 236, 237, 240, 241, 244, 245, 248, 249, 252, 253, 256, 257, 260, 261, 264, 265, 268, 269, 272, 273, 276, 277, 280, 281, 284, 285, 288, 289, 292, 293, 296, 297, 300, 301, 304, 305, 308, 309, 312, 313, 316, 317, 320, 321, 324, 325, 328, 329, 332, 333, 336, 337, 340, 341, 344, 345, 348, 349, 352, 353, 356, 357, 360, 361, 364, 365, 368, 369, 372, 373, 376, 377, 380, 381, 384, 385, 388, 389, 392, 393, 396, 397, 400, 401, 404, 405, 408, 409, 412, 413, 416, 417, 420, 421, 424, 425, 428, 429, 432, 433, 436, 437, 440, 441, 444, 445, 448, 449, 452, 453, 456, 457, 460, 461, 464, 465, 468, 469, 472, 473, 476, 477, 480, 481, 484, 485, 488, 489, 492, 493, 496, 497, 500, 501, 504, 505, 508, 509, 512, 513, 516, 517, 520, 521, 524, 525, 528, 529, 532, 533, 536, 537, 540, 541, 544, 545, 548, 549, 552, 553, 556, 557, 560, 561, 562, 563, 564, 565, 566, 567, 568, 569, 570, 571, 572, 573, 574, 575, 576, 577, 578, 579, 580, 581, 582, 583, 584, 585, 586, 587, 588, 589, 590, 591, 592, 593, 594, 595, 596, 597, 598, 599, 600, 601, 602, 603, 604, 605, 606, 607, 608, 609, 610, 611, 612, 613, 614, 615, 616, 617, 618, 619, 620, 621, 622, 623, 624, 625, 626, 627, 628, 629, 630, 631, 632, 633, 634, 635, 636, 637, 638, 639, 640, 641, 642, 643, 644, 645, 646, 647, 648, 649, 650, 651, 652, 653, 654, 655, 656, 657, 658, 659, 660, 661, 662, 663, 664, 665, 666, 667, 668, 669, 670, 671, 672, 673, 674, 675, 676, 677, 678, 679, 680, 681, 682, 683, 684, 685, 686, 687, 688, 689, 690, 691, 692, 693, 694, 695, 696, 697, 700, 701, 702, 703, 706, 707, 708, 709, 712, 713, 714, 715, 718, 719, 720, 721, or active variants and fragments thereof, and complements thereof, including, for example, SEQ ID NOS: 1, 9, 37, 45, 49, 61, 65, 77, 101, 113, 137, 141, 145, 149, 153, 157, 169, 173, 181, 185, 189, 205, 217, 225, 233, 561, 562, 563, 564, 565, 566, 567, 568, 569, 570, 571, 572, 573, 574, 575, 576, 577, 578, 579, 580, 581, 582, 583, 584, 585, 586, 587, 588, 589, 590, 591, 592, 593, 594, 595, 596, 597, 598, 599, 600, 601, 602, 603, 604, 605, 606, 607, 608, 609, 610, 611, 612, 613, 614, 615, 616, 617, 618, 619, 620, 621, 622, 623, 624, 625, 626, 627, 628, 629, 630, 631, 632, 633, 634, 635, 636, 637, 638, 639, 640, 641, 642, 643, 644, 645, 646, 647, 648, 649, 650, 651, 652, 653, 654, 655, 656, 657, 658, 659, 660, 661, 662, 663, 664, 665, 666, 667, 668, 669, 670, 671, 672, 673, 674, 675, 676, 677, 678, 679, 680, 681, 682, 683, 684, 685, 686, 687, 688, 689, 690, 691, 692, and active variants and fragments thereof, and complements thereof, and SEQ ID NOS: 4, 140, 144, 148, 693, 694, 695, 696, 697, 700, 701, 702, 703, 706, 707, 708, 709, 712, 713, 714, 715, 718, 719, 720, 721 and active variants and fragments thereof, and complements thereof.

13. The plant cell of claim 10, wherein said plant cell comprises the expression cassette of claim 8.

14. The plant cell of claim 10, wherein said silencing element expresses a double stranded RNA.

15. The plant cell of claim 10, wherein said silencing element expresses a hairpin RNA.

16. The plant cell of claim 15, wherein said polynucleotide comprising the silencing element comprises, in the following order, a first segment, a second segment, and a third segment, wherein
a) said first segment comprises at least about 19 nucleotides having at least 90% sequence complementarity to a target sequence set forth in any one of SEQ ID NOS: 1, 4, 5, 8, 9, 12, 13, 16, 17, 20, 21, 24, 25, 28, 29, 32, 33, 36, 37, 40, 41, 44, 45, 48, 49, 52, 53, 54, 55, 56, 57, 60, 61, 64, 65, 68, 69, 72, 73, 76, 77, 80, 81, 84, 85, 88, 89, 92, 93, 96, 97, 100, 101, 104, 105, 108, 109, 112, 113, 116, 117, 120, 121, 124, 125, 128, 129, 132, 133, 136, 137, 140, 141, 144, 145, 148, 149, 152, 153, 156, 157, 160, 161, 164, 165, 168, 169, 172, 173, 176, 177, 180, 181, 184, 185, 188, 189, 192, 193, 196, 197, 200, 201, 204, 205, 208, 209, 212, 213, 216, 217, 220, 221, 224, 225, 228, 229, 232, 233, 236, 237, 240, 241, 244, 245, 248, 249, 252, 253, 256, 257, 260, 261, 264, 265, 268, 269, 272, 273, 276, 277, 280, 281, 284, 285, 288, 289, 292, 293, 296, 297, 300, 301, 304, 305, 308, 309, 312, 313, 316, 317, 320, 321, 324, 325, 328, 329, 332, 333, 336, 337, 340, 341, 344, 345, 348, 349, 352, 353, 356, 357, 360, 361, 364, 365, 368, 369, 372, 373, 376, 377, 380, 381, 384, 385, 388, 389, 392, 393, 396, 397, 400, 401, 404, 405, 408, 409, 412, 413, 416, 417, 420, 421, 424, 425, 428, 429, 432, 433, 436, 437, 440, 441, 444, 445, 448, 449, 452, 453, 456, 457, 460, 461, 464, 465, 468, 469, 472, 473, 476, 477, 480, 481, 484, 485, 488, 489, 492, 493, 496, 497, 500, 501, 504, 505, 508, 509, 512, 513, 516, 517, 520, 521, 524, 525, 528, 529, 532, 533, 536, 537, 540, 541, 544, 545, 548, 549, 552, 553, 556, 557, 560, 561, 562, 563, 564, 565, 566, 567, 568, 569, 570, 571, 572, 573, 574, 575, 576, 577, 578, 579, 580, 581, 582, 583, 584, 585, 586, 587, 588, 589, 590, 591, 592, 593, 594, 595, 596, 597, 598, 599, 600, 601, 602, 603, 604, 605, 606, 607, 608, 609, 610, 611, 612, 613, 614, 615, 616, 617, 618, 619, 620, 621, 622, 623, 624, 625, 626, 627, 628, 629, 630, 631, 632, 633, 634, 635, 636, 637, 638, 639, 640, 641, 642, 643, 644, 645, 646, 647, 648, 649, 650, 651, 652, 653, 654, 655, 656, 657, 658, 659, 660, 661, 662, 663, 664, 665, 666, 667, 668, 669, 670, 671, 672, 673, 674, 675, 676, 677, 678, 679, 680, 681, 682, 683, 684, 685, 686, 687, 688, 689, 690, 691, 692, 693, 694, 695, 696, 697, 700, 701, 702, 703, 706, 707, 708, 709, 712, 713, 714, 715, 718, 719, 720, 721, or active variants and fragments thereof, and complements thereof, including, for example, SEQ ID NOS: 1, 9, 37, 45, 49, 61, 65, 77, 101, 113, 137, 141, 145, 149, 153, 157, 169, 173, 181, 185, 189, 205, 217, 225, 233, 561, 562, 563, 564, 565, 566, 567, 568, 569, 570, 571, 572, 573, 574, 575, 576, 577, 578, 579, 580, 581, 582, 583, 584, 585, 586, 587, 588, 589, 590, 591, 592, 593, 594, 595, 596, 597, 598, 599, 600, 601, 602, 603, 604, 605, 606, 607, 608, 609, 610, 611, 612, 613, 614, 615, 616, 617, 618, 619, 620, 621, 622, 623, 624, 625, 626, 627, 628, 629, 630, 631, 632, 633, 634, 635, 636, 637, 638, 639, 640, 641, 642, 643, 644, 645, 646, 647, 648, 649, 650, 651, 652, 653, 654, 655, 656, 657, 658, 659, 660, 661, 662, 663, 664, 665, 666, 667, 668, 669, 670, 671, 672, 673, 674, 675, 676, 677, 678, 679, 680, 681, 682, 683, 684, 685, 686, 687, 688, 689, 690, 691, 692, and active variants and fragments thereof, and complements thereof, and SEQ ID NOS: 4, 140, 144, 148, 693, 694, 695, 696, 697, 700, 701, 702, 703, 706, 707, 708, 709, 712, 713, 714, 715, 718, 719, 720, 721 and active variants and fragments thereof, and complements thereof;
b) said second segment comprises a loop of sufficient length to allow the silencing element to be transcribed as a hairpin RNA; and,
c) said third segment comprises at least about 19 nucleotides having at least 85% complementarity to the first segment.

17. The plant cell of claim 10, wherein said silencing element is operably linked to a heterologous promoter.

18. The plant cell of claim 10, wherein said plant cell is from a monocot.

19. The plant cell of claim 18, wherein said monocot is maize, barley, millet, wheat or rice.

20. The plant cell of claim 10, wherein said plant cell is from a dicot.

21. The plant cell of claim 20, wherein said plant is soybean, canola, alfalfa, sunflower, safflower, tobacco, Arabidopsis, or cotton.

22. A plant or plant part comprising a plant cell of claim 10.

23. A transgenic seed from the plant of claim 22.

24. A method for controlling a Coleoptera plant pest comprising feeding to a Coleoptera plant pest a composition comprising a silencing element, wherein said silencing element, when ingested by said Coleoptera plant pest, reduces the level of a target Coleoptera plant pest sequence and thereby controls the Coleoptera plant pest, wherein said target Coleoptera plant pest sequence comprise a nucleotide sequence comprising at least 90% sequence identity to any one of SEQ ID NOS: 1, 4, 5, 8, 9, 12, 13, 16, 17, 20, 21, 24, 25, 28, 29, 32, 33, 36, 37, 40, 41, 44, 45, 48, 49, 52, 53, 54, 55, 56, 57, 60, 61, 64, 65, 68, 69, 72, 73, 76, 77, 80, 81, 84, 85, 88, 89, 92, 93, 96, 97, 100, 101, 104, 105, 108, 109, 112, 113, 116, 117, 120, 121, 124, 125, 128, 129, 132, 133, 136, 137, 140, 141, 144, 145, 148, 149, 152, 153, 156, 157, 160, 161, 164, 165, 168, 169, 172, 173, 176, 177, 180, 181, 184, 185, 188, 189, 192, 193, 196, 197, 200, 201, 204, 205, 208, 209, 212, 213, 216, 217, 220, 221, 224, 225, 228, 229, 232, 233, 236, 237, 240, 241, 244, 245, 248, 249, 252, 253, 256, 257, 260, 261, 264, 265, 268, 269, 272, 273, 276, 277, 280, 281, 284, 285, 288, 289, 292, 293, 296, 297, 300, 301, 304, 305, 308, 309, 312, 313, 316, 317, 320, 321, 324, 325, 328, 329, 332, 333, 336, 337, 340, 341, 344, 345, 348, 349, 352, 353, 356, 357, 360, 361, 364, 365, 368, 369, 372, 373, 376, 377, 380, 381, 384, 385, 388, 389, 392, 393, 396, 397, 400, 401, 404, 405, 408, 409, 412, 413, 416, 417, 420, 421, 424, 425, 428, 429, 432, 433, 436, 437, 440, 441, 444, 445, 448, 449, 452, 453, 456, 457, 460, 461, 464, 465, 468, 469, 472, 473, 476, 477, 480, 481, 484, 485, 488, 489, 492, 493, 496, 497, 500, 501, 504, 505, 508, 509, 512, 513, 516, 517, 520, 521, 524, 525, 528, 529, 532, 533, 536, 537, 540, 541, 544, 545, 548, 549, 552, 553, 556, 557, 560, 561, 562, 563, 564, 565, 566, 567, 568, 569, 570, 571, 572, 573, 574, 575, 576, 577, 578, 579, 580, 581, 582, 583, 584, 585, 586, 587, 588, 589, 590, 591, 592, 593, 594, 595, 596, 597, 598, 599, 600, 601, 602, 603, 604, 605, 606, 607, 608, 609, 610, 611, 612, 613, 614, 615, 616, 617, 618, 619, 620, 621, 622, 623, 624, 625, 626, 627, 628, 629, 630, 631, 632, 633, 634, 635, 636, 637, 638, 639, 640, 641, 642, 643, 644, 645, 646, 647, 648, 649, 650, 651, 652, 653, 654, 655, 656, 657, 658, 659, 660, 661, 662, 663, 664, 665, 666, 667, 668, 669, 670, 671, 672, 673, 674, 675, 676, 677, 678, 679, 680, 681, 682, 683, 684, 685, 686, 687, 688, 689, 690, 691, 692, 693, 694, 695, 696, 697, 700, 701, 702, 703, 706, 707, 708, 709, 712, 713, 714, 715, 718, 719, 720, 721, or active variants and fragments thereof, and complements thereof, including, for example, SEQ ID NOS: 1, 9, 37, 45, 49, 61, 65, 77, 101, 113, 137, 141, 145, 149, 153, 157, 169, 173, 181, 185, 189, 205, 217, 225, 233, 561, 562, 563, 564, 565, 566, 567, 568, 569, 570, 571, 572, 573, 574, 575, 576, 577, 578, 579, 580, 581, 582, 583, 584, 585, 586, 587, 588, 589, 590, 591, 592, 593, 594, 595, 596, 597, 598, 599, 600, 601, 602, 603, 604, 605, 606, 607, 608, 609, 610, 611, 612, 613, 614, 615, 616, 617, 618, 619, 620, 621, 622, 623, 624, 625, 626, 627, 628, 629, 630, 631, 632, 633, 634, 635, 636, 637, 638, 639, 640, 641, 642, 643, 644, 645, 646, 647, 648, 649, 650, 651, 652, 653, 654, 655, 656, 657, 658, 659, 660, 661, 662, 663, 664, 665, 666, 667, 668, 669, 670, 671, 672, 673, 674, 675, 676, 677, 678, 679, 680, 681, 682, 683, 684, 685, 686, 687, 688, 689, 690, 691, 692, and active variants and fragments thereof, and complements thereof, and SEQ ID NOS: 4, 140, 144, 148, 693, 694, 695, 696, 697, 700, 701, 702, 703, 706, 707, 708, 709, 712, 713, 714, 715, 718, 719, 720, 721 and active variants and fragments thereof, and complements thereof.

25. The method of claim 24, wherein said Coleoptera plant pest comprises a Diabrotica plant pest.

26. The method of claim 24, wherein said silencing element comprises
a) a fragment of at least 19 consecutive nucleotides of any one SEQ ID NOS: 1, 4, 5, 8, 9, 12, 13, 16, 17, 20, 21, 24, 25, 28, 29, 32, 33, 36, 37, 40, 41, 44, 45, 48, 49, 52, 53, 54, 55, 56, 57, 60, 61, 64, 65, 68, 69, 72, 73, 76, 77, 80, 81, 84, 85, 88, 89, 92, 93, 96, 97, 100, 101, 104, 105, 108, 109, 112, 113, 116, 117, 120, 121, 124, 125, 128, 129, 132, 133, 136, 137, 140, 141, 144, 145, 148, 149, 152, 153, 156, 157, 160, 161, 164, 165, 168, 169, 172, 173, 176, 177, 180, 181, 184, 185, 188, 189, 192, 193, 196, 197, 200, 201, 204, 205, 208, 209, 212, 213, 216, 217, 220, 221, 224, 225, 228, 229, 232, 233, 236, 237, 240, 241, 244, 245, 248, 249, 252, 253, 256, 257, 260, 261, 264, 265, 268, 269, 272, 273, 276, 277, 280, 281, 284, 285, 288, 289, 292, 293, 296, 297, 300, 301, 304, 305, 308, 309, 312, 313, 316, 317, 320, 321, 324, 325, 328, 329, 332, 333, 336, 337, 340, 341, 344, 345, 348, 349, 352, 353, 356, 357, 360, 361, 364, 365, 368, 369, 372, 373, 376, 377, 380, 381, 384, 385, 388, 389, 392, 393, 396, 397, 400, 401, 404, 405, 408, 409, 412, 413, 416, 417, 420, 421, 424, 425, 428, 429, 432, 433, 436, 437, 440, 441, 444, 445, 448, 449, 452, 453, 456, 457, 460, 461, 464, 465, 468, 469, 472, 473, 476, 477, 480, 481, 484, 485, 488, 489, 492, 493, 496, 497, 500, 501, 504, 505, 508, 509, 512, 513, 516, 517, 520, 521, 524, 525, 528, 529, 532, 533, 536, 537, 540, 541, 544, 545, 548, 549, 552, 553, 556, 557, 560, 561, 562, 563, 564, 565, 566, 567, 568, 569, 570, 571, 572, 573, 574, 575, 576, 577, 578, 579, 580, 581, 582, 583, 584, 585, 586, 587, 588, 589, 590, 591, 592, 593, 594, 595, 596, 597, 598, 599, 600, 601, 602, 603, 604, 605, 606, 607, 608, 609, 610, 611, 612, 613, 614, 615, 616, 617, 618, 619, 620, 621, 622, 623, 624, 625, 626, 627, 628, 629, 630, 631, 632, 633, 634, 635, 636, 637, 638, 639, 640, 641, 642, 643, 644, 645, 646, 647, 648, 649, 650, 651, 652, 653, 654, 655, 656, 657, 658, 659, 660, 661, 662, 663, 664, 665, 666, 667, 668, 669, 670, 671, 672, 673, 674, 675, 676, 677, 678, 679, 680, 681, 682, 683, 684, 685, 686, 687, 688, 689, 690, 691, 692, 693, 694, 695, 696, 697, 700, 701, 702, 703, 706, 707, 708, 709, 712, 713, 714, 715, 718, 719, 720, 721, or active variants and fragments thereof, and complements thereof, including, for example, SEQ ID NOS: 1, 9, 37, 45, 49, 61, 65, 77, 101, 113, 137, 141, 145, 149, 153, 157, 169, 173, 181, 185, 189, 205, 217, 225, 233, 561, 562, 563, 564, 565, 566, 567, 568, 569, 570, 571, 572, 573, 574, 575, 576, 577, 578, 579, 580, 581, 582, 583, 584, 585, 586, 587, 588, 589, 590, 591, 592, 593, 594, 595, 596, 597, 598, 599, 600, 601, 602, 603, 604, 605, 606, 607, 608, 609, 610, 611, 612, 613, 614, 615, 616, 617, 618, 619, 620, 621, 622, 623, 624, 625, 626, 627, 628, 629, 630, 631, 632, 633, 634, 635, 636, 637, 638, 639, 640, 641, 642, 643, 644, 645, 646, 647, 648, 649, 650, 651, 652, 653, 654, 655, 656, 657, 658, 659, 660, 661, 662, 663, 664, 665, 666, 667, 668, 669, 670, 671, 672, 673, 674, 675, 676, 677, 678, 679, 680, 681, 682, 683, 684, 685, 686, 687, 688, 689, 690, 691, 692, and active variants and fragments thereof, and complements thereof, and SEQ ID NOS: 4, 140, 144, 148, 693, 694, 695, 696, 697, 700, 701, 702, 703, 706, 707, 708, 709, 712, 713, 714, 715, 718, 719, 720, 721 and active variants and fragments thereof, and complements thereof; or,
b) a nucleotide sequence comprising at least 90% sequence identity to any one of SEQ ID NOS: 1, 4, 5, 8, 9, 12, 13, 16, 17, 20, 21, 24, 25, 28, 29, 32, 33, 36, 37, 40, 41, 44, 45, 48, 49, 52, 53, 54, 55, 56, 57, 60, 61, 64, 65, 68, 69, 72, 73, 76, 77, 80, 81, 84, 85, 88, 89, 92, 93, 96, 97, 100, 101, 104, 105, 108, 109, 112, 113, 116, 117, 120, 121, 124, 125, 128, 129, 132, 133, 136, 137, 140, 141, 144, 145, 148, 149, 152, 153, 156, 157, 160, 161, 164, 165, 168, 169, 172, 173, 176, 177, 180, 181, 184, 185, 188, 189, 192, 193, 196, 197, 200, 201, 204, 205, 208, 209, 212, 213, 216, 217, 220, 221, 224, 225, 228, 229, 232, 233, 236, 237, 240, 241, 244, 245, 248, 249, 252, 253, 256, 257, 260, 261, 264, 265, 268, 269, 272, 273, 276, 277, 280, 281, 284, 285, 288, 289, 292, 293, 296, 297, 300, 301, 304, 305, 308, 309, 312, 313, 316, 317, 320, 321, 324, 325, 328, 329, 332, 333, 336, 337, 340, 341, 344, 345, 348, 349, 352, 353, 356, 357, 360, 361, 364, 365, 368, 369, 372, 373, 376, 377, 380, 381, 384, 385, 388, 389, 392, 393, 396, 397, 400, 401, 404, 405, 408, 409, 412, 413, 416, 417, 420, 421, 424, 425, 428, 429, 432, 433, 436, 437, 440, 441, 444, 445, 448, 449, 452, 453, 456, 457, 460, 461, 464, 465, 468, 469, 472, 473, 476, 477, 480, 481, 484, 485, 488, 489, 492, 493, 496, 497, 500, 501, 504, 505, 508, 509, 512, 513, 516, 517, 520, 521, 524, 525, 528, 529, 532, 533, 536, 537, 540, 541, 544, 545, 548, 549, 552, 553, 556, 557, 560, 561, 562, 563, 564, 565, 566, 567, 568, 569, 570, 571, 572, 573, 574, 575, 576, 577, 578, 579, 580, 581, 582, 583, 584, 585, 586, 587, 588, 589, 590, 591, 592, 593, 594, 595, 596, 597, 598, 599, 600, 601, 602, 603, 604, 605, 606, 607, 608, 609, 610, 611, 612, 613, 614, 615, 616, 617, 618, 619, 620, 621, 622, 623, 624, 625, 626, 627, 628, 629, 630, 631, 632, 633, 634, 635, 636, 637, 638, 639, 640, 641, 642, 643, 644, 645, 646, 647, 648, 649, 650, 651, 652, 653, 654, 655, 656, 657, 658, 659, 660, 661, 662, 663, 664, 665, 666, 667, 668, 669, 670, 671, 672, 673, 674, 675, 676, 677, 678, 679, 680, 681, 682, 683, 684, 685, 686, 687, 688, 689, 690, 691, 692, 693, 694, 695, 696, 697, 700, 701, 702, 703, 706, 707, 708, 709, 712, 713, 714, 715, 718, 719, 720, 721, or active variants and fragments thereof, and complements thereof, including, for example, SEQ ID NOS: 1, 9, 37, 45, 49, 61, 65, 77, 101, 113, 137, 141, 145, 149, 153, 157, 169, 173, 181, 185, 189, 205, 217, 225, 233, 561, 562, 563, 564, 565, 566, 567, 568, 569, 570, 571, 572, 573, 574, 575, 576, 577, 578, 579, 580, 581, 582, 583, 584, 585, 586, 587, 588, 589, 590, 591, 592, 593, 594, 595, 596, 597, 598, 599, 600, 601, 602, 603, 604, 605, 606, 607, 608, 609, 610, 611, 612, 613, 614, 615, 616, 617, 618, 619, 620, 621, 622, 623, 624, 625, 626, 627, 628, 629, 630, 631, 632, 633, 634, 635, 636, 637, 638, 639, 640, 641, 642, 643, 644, 645, 646, 647, 648, 649, 650, 651, 652, 653, 654, 655, 656, 657, 658, 659, 660, 661, 662, 663, 664, 665, 666, 667, 668, 669, 670, 671, 672, 673, 674, 675, 676, 677, 678, 679, 680, 681, 682, 683, 684, 685, 686, 687, 688, 689, 690, 691, 692, and active variants and fragments thereof, and complements thereof, and SEQ ID NOS: 4, 140, 144, 148, 693, 694, 695, 696, 697, 700, 701, 702, 703, 706, 707, 708, 709, 712, 713, 714, 715, 718, 719, 720, 721 and active variants and fragments thereof, and complements thereof.

27. The method of claim 25, wherein said Diabrotica plant pest comprises D. virgifera virgifera, D. virgifera zeae, D. speciosa, D. barberi, D. virgifera zeae, D. speciosa, or D. undecimpunctata howardi.

28. The method of claim 24, wherein said composition comprises a plant or plant part having stably incorporated into its genome a polynucleotide comprising said silencing element.

29. The method of claim 26, wherein said silencing element comprises
a) a polynucleotide comprising the sense or antisense sequence of the sequence set forth in any one SEQ ID NOS: 1, 4, 5, 8, 9, 12, 13, 16, 17, 20, 21, 24, 25, 28, 29, 32, 33, 36, 37, 40, 41, 44, 45, 48, 49, 52, 53, 54, 55, 56, 57, 60, 61, 64, 65, 68, 69, 72, 73, 76, 77, 80, 81, 84, 85, 88, 89, 92, 93, 96, 97, 100, 101, 104, 105, 108, 109, 112, 113, 116, 117, 120, 121, 124, 125, 128, 129, 132, 133, 136, 137, 140, 141, 144, 145, 148, 149, 152, 153, 156, 157, 160, 161, 164, 165, 168, 169, 172, 173, 176, 177, 180, 181, 184, 185, 188, 189, 192, 193, 196, 197, 200, 201, 204, 205, 208, 209, 212, 213, 216, 217, 220, 221, 224, 225, 228, 229, 232, 233, 236, 237, 240, 241, 244, 245, 248, 249, 252, 253, 256, 257, 260, 261, 264, 265, 268, 269, 272, 273, 276, 277, 280, 281, 284, 285, 288, 289, 292, 293, 296, 297, 300, 301, 304, 305, 308, 309, 312, 313, 316, 317, 320, 321, 324, 325, 328, 329, 332, 333, 336, 337, 340, 341, 344, 345, 348, 349, 352, 353, 356, 357, 360, 361, 364, 365, 368, 369, 372, 373, 376, 377, 380, 381, 384, 385, 388, 389, 392, 393, 396, 397, 400, 401, 404, 405, 408, 409, 412, 413, 416, 417, 420, 421, 424, 425, 428, 429, 432, 433, 436, 437, 440, 441, 444, 445, 448, 449, 452, 453, 456, 457, 460, 461, 464, 465, 468, 469, 472, 473, 476, 477, 480, 481, 484, 485, 488, 489, 492, 493, 496, 497, 500, 501, 504, 505, 508, 509, 512, 513, 516, 517, 520, 521, 524, 525, 528, 529, 532, 533, 536, 537, 540, 541, 544, 545, 548, 549, 552, 553, 556, 557, 560, 561, 562, 563, 564, 565, 566, 567, 568, 569, 570, 571, 572, 573, 574, 575, 576, 577, 578, 579, 580, 581, 582, 583, 584, 585, 586, 587, 588, 589, 590, 591, 592, 593, 594, 595, 596, 597, 598, 599, 600, 601, 602, 603, 604, 605, 606, 607, 608, 609, 610, 611, 612, 613, 614, 615, 616, 617, 618, 619, 620, 621, 622, 623, 624, 625, 626, 627, 628, 629, 630, 631, 632, 633, 634, 635, 636, 637, 638, 639, 640, 641, 642, 643, 644, 645, 646, 647, 648, 649, 650, 651, 652, 653, 654, 655, 656, 657, 658, 659, 660, 661, 662, 663, 664, 665, 666, 667, 668, 669, 670, 671, 672, 673, 674, 675, 676, 677, 678, 679, 680, 681, 682, 683, 684, 685, 686, 687, 688, 689, 690, 691, 692, 693, 694, 695, 696, 697, 700, 701, 702, 703, 706, 707, 708, 709, 712, 713, 714, 715, 718, 719, 720, 721, or active variants and fragments thereof, and complements thereof, including, for example, SEQ ID NOS: 1, 9, 37, 45, 49, 61, 65, 77, 101, 113, 137, 141, 145, 149, 153, 157, 169, 173, 181, 185, 189, 205, 217, 225, 233, 561, 562, 563, 564, 565, 566, 567, 568, 569, 570, 571, 572, 573, 574, 575, 576, 577, 578, 579, 580, 581, 582, 583, 584, 585, 586, 587, 588, 589, 590, 591, 592, 593, 594, 595, 596, 597, 598, 599, 600, 601, 602, 603, 604, 605, 606, 607, 608, 609, 610, 611, 612, 613, 614, 615, 616, 617, 618, 619, 620, 621, 622, 623, 624, 625, 626, 627, 628, 629, 630, 631, 632, 633, 634, 635, 636, 637, 638, 639, 640, 641, 642, 643, 644, 645, 646, 647, 648, 649, 650, 651, 652, 653, 654, 655, 656, 657, 658, 659, 660, 661, 662, 663, 664, 665, 666, 667, 668, 669, 670, 671, 672, 673, 674, 675, 676, 677, 678, 679, 680, 681, 682, 683, 684, 685, 686, 687, 688, 689, 690, 691, 692, and active variants and fragments thereof, and complements thereof, and SEQ ID NOS: 4, 140, 144, 148, 693, 694, 695, 696, 697, 700, 701, 702, 703, 706, 707, 708, 709, 712, 713, 714, 715, 718, 719, 720, 721 and active variants and fragments thereof, and complements thereof;
b) a polynucleotide comprising the sense or antisense sequence of a sequence having at least 95% sequence identity to the sequence set forth in any one of SEQ ID NOS: 1, 4, 5, 8, 9, 12, 13, 16, 17, 20, 21, 24, 25, 28, 29, 32, 33, 36, 37, 40, 41, 44, 45, 48, 49, 52, 53, 54, 55, 56, 57, 60, 61, 64, 65, 68, 69, 72, 73, 76, 77, 80, 81, 84, 85, 88, 89, 92, 93, 96, 97, 100, 101, 104, 105, 108, 109, 112, 113, 116, 117, 120, 121, 124, 125, 128, 129, 132, 133, 136, 137, 140, 141, 144, 145, 148, 149, 152, 153, 156, 157, 160, 161, 164, 165, 168, 169, 172, 173, 176, 177, 180, 181, 184, 185, 188, 189, 192, 193, 196, 197, 200, 201, 204, 205, 208, 209, 212, 213, 216, 217, 220, 221, 224, 225, 228, 229, 232, 233, 236, 237, 240, 241, 244, 245, 248, 249, 252, 253, 256, 257, 260, 261, 264, 265, 268, 269, 272, 273, 276, 277, 280, 281, 284, 285, 288, 289, 292, 293, 296, 297, 300, 301, 304, 305, 308, 309, 312, 313, 316, 317, 320, 321, 324, 325, 328, 329, 332, 333, 336, 337, 340, 341, 344, 345, 348, 349, 352, 353, 356, 357, 360, 361, 364, 365, 368, 369, 372, 373, 376, 377, 380, 381, 384, 385, 388, 389, 392, 393, 396, 397, 400, 401, 404, 405, 408, 409, 412, 413, 416, 417, 420, 421, 424, 425, 428, 429, 432, 433, 436, 437, 440, 441, 444, 445, 448, 449, 452, 453, 456, 457, 460, 461, 464, 465, 468, 469, 472, 473, 476, 477, 480, 481, 484, 485, 488, 489, 492, 493, 496, 497, 500, 501, 504, 505, 508, 509, 512, 513, 516, 517, 520, 521, 524, 525, 528, 529, 532, 533, 536, 537, 540, 541, 544, 545, 548, 549, 552, 553, 556, 557, 560, 561, 562, 563, 564, 565, 566, 567, 568, 569, 570, 571, 572, 573, 574, 575, 576, 577, 578, 579, 580, 581, 582, 583, 584, 585, 586, 587, 588, 589, 590, 591, 592, 593, 594, 595, 596, 597, 598, 599, 600, 601, 602, 603, 604, 605, 606, 607, 608, 609, 610, 611, 612, 613, 614, 615, 616, 617, 618, 619, 620, 621, 622, 623, 624, 625, 626, 627, 628, 629, 630, 631, 632, 633, 634, 635, 636, 637, 638, 639, 640, 641, 642, 643, 644, 645, 646, 647, 648, 649, 650, 651, 652, 653, 654, 655, 656, 657, 658, 659, 660, 661, 662, 663, 664, 665, 666, 667, 668, 669, 670, 671, 672, 673, 674, 675, 676, 677, 678, 679, 680, 681, 682, 683, 684, 685, 686, 687, 688, 689, 690, 691, 692, 693, 694, 695, 696, 697, 700, 701, 702, 703, 706, 707, 708, 709, 712, 713, 714, 715, 718, 719, 720, 721, or active variants and fragments thereof, and complements thereof, including, for example, SEQ ID NOS: 1, 9, 37, 45, 49, 61, 65, 77, 101, 113, 137, 141, 145, 149, 153, 157, 169, 173, 181, 185, 189, 205, 217, 225, 233, 561, 562, 563, 564, 565, 566, 567, 568, 569, 570, 571, 572, 573, 574, 575, 576, 577, 578, 579, 580, 581, 582, 583, 584, 585, 586, 587, 588, 589, 590, 591, 592, 593, 594, 595, 596, 597, 598, 599, 600, 601, 602, 603, 604, 605, 606, 607, 608, 609, 610, 611, 612, 613, 614, 615, 616, 617, 618, 619, 620, 621, 622, 623, 624, 625, 626, 627, 628, 629, 630, 631, 632, 633, 634, 635, 636, 637, 638, 639, 640, 641, 642, 643, 644, 645, 646, 647, 648, 649, 650, 651, 652, 653, 654, 655, 656, 657, 658, 659, 660, 661, 662, 663, 664, 665, 666, 667, 668, 669, 670, 671, 672, 673, 674, 675, 676, 677, 678, 679, 680, 681, 682, 683, 684, 685, 686, 687, 688, 689, 690, 691, 692, and active variants and fragments thereof, and complements thereof, and SEQ ID NOS: 4, 140, 144, 148, 693, 694, 695, 696, 697, 700, 701, 702, 703, 706, 707, 708, 709, 712, 713, 714, 715, 718, 719, 720, 721 and active variants and fragments thereof, and complements thereof;
c) a polynucleotide comprising the sense or antisense sequence of a sequence having at least 130 contiguous nucleotides of any one of SEQ ID NOS: 1, 4, 5, 8, 9, 12, 13, 16, 17, 20, 21, 24, 25, 28, 29, 32, 33, 36, 37, 40, 41, 44, 45, 48, 49, 52, 53, 54, 55, 56, 57, 60, 61, 64, 65, 68, 69, 72, 73, 76, 77, 80, 81, 84, 85, 88, 89, 92, 93, 96, 97, 100, 101, 104, 105, 108, 109, 112, 113, 116, 117, 120, 121, 124, 125, 128, 129, 132, 133, 136, 137, 140, 141, 144, 145, 148, 149, 152, 153, 156, 157, 160, 161, 164, 165, 168, 169, 172, 173, 176, 177, 180, 181, 184, 185, 188, 189, 192, 193, 196, 197, 200, 201, 204, 205, 208, 209, 212, 213, 216, 217, 220, 221, 224, 225, 228, 229, 232, 233, 236, 237, 240, 241, 244, 245, 248, 249, 252, 253, 256, 257, 260, 261, 264, 265, 268, 269, 272, 273, 276, 277, 280, 281, 284, 285, 288, 289, 292, 293, 296, 297, 300, 301, 304, 305, 308, 309, 312, 313, 316, 317, 320, 321, 324, 325, 328, 329, 332, 333, 336, 337, 340, 341, 344, 345, 348, 349, 352, 353, 356, 357, 360, 361, 364, 365, 368, 369, 372, 373, 376, 377, 380, 381, 384, 385, 388, 389, 392, 393, 396, 397, 400, 401, 404, 405, 408, 409, 412, 413, 416, 417, 420, 421, 424, 425, 428, 429, 432, 433, 436, 437, 440, 441, 444, 445, 448, 449, 452, 453, 456, 457, 460, 461, 464, 465, 468, 469, 472, 473, 476, 477, 480, 481, 484, 485, 488, 489, 492, 493, 496, 497, 500, 501, 504, 505, 508, 509, 512, 513, 516, 517, 520, 521, 524, 525, 528, 529, 532, 533, 536, 537, 540, 541, 544, 545, 548, 549, 552, 553, 556, 557, 560, 561, 562, 563, 564, 565, 566, 567, 568, 569, 570, 571, 572, 573, 574, 575, 576, 577, 578, 579, 580, 581, 582, 583, 584, 585, 586, 587, 588, 589, 590, 591, 592, 593, 594, 595, 596, 597, 598, 599, 600, 601, 602, 603, 604, 605, 606, 607, 608, 609, 610, 611, 612, 613, 614, 615, 616, 617, 618, 619, 620, 621, 622, 623, 624, 625, 626, 627, 628, 629, 630, 631, 632, 633, 634, 635, 636, 637, 638, 639, 640, 641, 642, 643, 644, 645, 646, 647, 648, 649, 650, 651, 652, 653, 654, 655, 656, 657, 658, 659, 660, 661, 662, 663, 664, 665, 666, 667, 668, 669, 670, 671, 672, 673, 674, 675, 676, 677, 678, 679, 680, 681, 682, 683, 684, 685, 686, 687, 688, 689, 690, 691, 692, 693, 694, 695, 696, 697, 700, 701, 702, 703, 706, 707, 708, 709, 712, 713, 714, 715, 718, 719, 720, 721, or active variants and fragments thereof, and complements thereof, including, for example, SEQ ID NOS: 1, 9, 37, 45, 49, 61, 65, 77, 101, 113, 137, 141, 145, 149, 153, 157, 169, 173, 181, 185, 189, 205, 217, 225, 233, 561, 562, 563, 564, 565, 566, 567, 568, 569, 570, 571, 572, 573, 574, 575, 576, 577, 578, 579, 580, 581, 582, 583, 584, 585, 586, 587, 588, 589, 590, 591, 592, 593, 594, 595, 596, 597, 598, 599, 600, 601, 602, 603, 604, 605, 606, 607, 608, 609, 610, 611, 612, 613, 614, 615, 616, 617, 618, 619, 620, 621, 622, 623, 624, 625, 626, 627, 628, 629, 630, 631, 632, 633, 634, 635, 636, 637, 638, 639, 640, 641, 642, 643, 644, 645, 646, 647, 648, 649, 650, 651, 652, 653, 654, 655, 656, 657, 658, 659, 660, 661, 662, 663, 664, 665, 666, 667, 668, 669, 670, 671, 672, 673, 674, 675, 676, 677, 678, 679, 680, 681, 682, 683, 684, 685, 686, 687, 688, 689, 690, 691, 692, and active variants and fragments thereof, and complements thereof, and SEQ ID NOS: 4, 140, 144, 148, 693, 694, 695, 696, 697, 700, 701, 702, 703, 706, 707, 708, 709, 712, 713, 714, 715, 718, 719, 720, 721 and active variants and fragments thereof, and complements thereof.

30. The method of claim 24, wherein said silencing element expresses a double stranded RNA.

31. The method of claim 24, wherein said silencing element comprises a hairpin RNA.

32. The method of claim 31, wherein said polynucleotide comprising the silencing element comprises, in the following order, a first segment, a second segment, and a third segment, wherein
a) said first segment comprises at least about 19 nucleotides having at least 90% sequence complementarity to the target polynucleotide;
b) said second segment comprises a loop of sufficient length to allow the silencing element to be transcribed as a hairpin RNA; and,
c) said third segment comprises at least about 19 nucleotides having at least 85% complementarity to the first segment.

33. The method of claim 28, wherein said silencing element is operably linked to a heterologous promoter.

34. The method of claim 28, wherein said silencing element is flanked by a first operably linked convergent promoter at one terminus of the silencing element and a second operably linked convergent promoter at the opposing terminus of the polynucleotide, wherein the first and the second convergent promoters are capable of driving expression of the silencing element.

35. The method of claim 28, wherein said plant is a monocot.

36. The method of claim 35, wherein said monocot is maize, barley, millet, wheat or rice.

37. The method of claim 28, wherein said plant is a dicot.

38. The method of claim 37, wherein said plant is soybean, canola, alfalfa, sunflower, safflower, tobacco, Arabidopsis, or cotton.
